(19) United States
(12) Patent Application Publication
(10) Pub. No.: US 2024/0374735 A1
(43) Pub. Date: Nov. 14, 2024

(54) AROMATIC BORON-CONTAINING COMPOUNDS AND INSULIN ANALOGS

(71) Applicant: PROTOMER TECHNOLOGIES INC., Indianapolis, IN (US)

(72) Inventors: Ryan Kelly SPENCER, Porter Ranch, CA (US); Diao CHEN, Pasadena, CA (US); Sachitanand MALI, Pasadena, CA (US); Jack Joseph STEELE (nee HALE), Pasadena, CA (US); Jingxin LIANG, Covington, WA (US); Mirna Ekram Anwar SHAKER, Cypress, CA (US); Alborz MAHDAVI, Pasadena, CA (US)

(21) Appl. No.: 18/253,408

(22) PCT Filed: Nov. 18, 2021
(86) PCT No.: PCT/US2021/059802

§ 371 Date: Apr. 19, 2024

(30) Foreign Application Priority Data
Nov. 19, 2020 (US) 63116050
Dec. 7, 2020 (US) 63122338
Jun. 15, 2021 (US) 63210968
Sep. 29, 2021 (US) 63249868

(51) Int. Cl. A61K 47/54; A61K 38/22; A61K 38/26; A61K 38/28; A61K 38/31

(52) U.S. Cl. CPC A61K 47/545; A61K 38/22; A61K 38/26; A61K 38/28; A61K 38/31; A61K 47/542; A61K 47/543

(57) ABSTRACT

The present disclosure relates to novel compounds that include one or more aromatic boron-containing groups. The present disclosure further relates to pharmaceutical compositions containing such compounds, and their use in prevention and treatment of disorders, such as hyperglycemia, type 2 diabetes, impaired glucose tolerance, type 1 diabetes, obesity, metabolic syndrome X, or dyslipidemia, diabetes during pregnancy, pre-diabetes, Alzheimer's disease, MODY 1, MODY 2 or MODY 3 diabetes, mood disorders, and psychiatric disorders.

### CROSS REFERENCES TO RELATED APPLICATIONS

[0001] This application claims priority from U.S. Provisional Patent Application Nos. 63/116,050, filed Nov. 19, 2020, 63/122,338, filed Dec. 7, 2020, 63/210,968, filed Jun. 15, 2021, and 63/249,868, filed Sep. 29, 2021, all of which are incorporated herein by reference.

### FIELD OF THE DISCLOSURE

[0002] The present disclosure relates to novel compounds that include one or more aromatic boron-containing groups. The present disclosure further relates to kits and the use of the compounds and/or pharmaceutical compositions comprising the disclosed compounds for the treatment of disorders, such as hyperglycemia, type 2 diabetes, impaired glucose tolerance, type 1 diabetes, obesity, metabolic syndrome X, or dyslipidemia, diabetes during pregnancy, pre-diabetes, Alzheimer's disease, MODY 1, MODY 2 or MODY 3 diabetes, mood disorders, and psychiatric disorders.

### SEQUENCE LISTING

[0003] The present application is being filed along with a Sequence Listing in electronic format. The Sequence Listing is provided as a file titled “X23056 2Nov2021_ST25,” created Nov. 2, 2021, and is 4,084,000 bytes in size. The information in the electronic format of the Sequence Listing is incorporated herein by reference in its entirety.

### BACKGROUND OF THE DISCLOSURE

[0004] Boronic acids are generally considered Lewis acids that have a tendency to bind to hydroxyls, because, as Lewis acids, boronic acids can form complexes with Lewis bases such as, for example, hydroxide anions. Thus, molecules containing boronates including boronic acids have a general tendency to bind hydroxyl groups. This binding tendency can be used for detection of hydroxyl-containing groups by boronated labeling reagents wherein the boronate groups bind to the hydroxyls and, depending on the solvent and buffer conditions, the boronates can form hydrolysable boronate-ester bonds to the hydroxyl groups of hydroxyl containing molecules, such as the hydroxyl groups present in diols (e.g., glucose). Although boron-containing compounds can bind to diol containing molecules, achieving selectivity using boron-containing compounds has been challenging because of their ability to bind various diols, including cis diols, to varying degrees. While improved binding affinity of boron-containing compounds towards a specific vicinal diol of interest may be achieved, this may result in a loss of selectivity.

[0005] Glucose is the main fuel for the human body, and blood glucose values are tightly regulated in healthy individuals. For example, between meals, blood glucose is near 5 mmol/L (mM), and when blood glucose concentrations rise after a meal, the value is quickly adjusted back toward 5 mM by the action of insulin. The hormone insulin is secreted from pancreatic beta cells, and when insulin binds to insulin receptors on cells all over the body (for example muscle and fat), the cells are stimulated to absorb glucose by translocation of glucose transporters from storage vesicles to the cell surface (GLUT4). (Huang, S. H. et al. (2007) Cell Metabolism 5:237-252.)

[0006] People with diabetes may lose their ability to produce insulin due to autoimmunity against the beta cells (type 1) or have low sensitivity to insulin in combination with impaired insulin secretion (type 2). For example, those with type 1 diabetes may rely on multiple daily insulin injections, both for basal coverage, typically once a day, and with meals (bolus) to control their glucose levels. (Polonsky, K. S. et al. (1988) The Journal of Clinical Investigation 81: 442-448.) Because glucose values can fluctuate unpredictably, perfect insulin dosing day after day is extremely difficult. Indeed, despite many technological advances in diabetes treatment, researchers are currently seeing, partly due to lifestyle problems, a worsening of long-term glucose control and/or overall metabolic health.

[0007] Thus, there is an unmet medical need for novel compounds, such as glucose-responsive insulin analogues/conjugates, that can control blood glucose levels.

### SUMMARY OF THE DISCLOSURE

[0008] The present disclosure provides, according to some embodiments, novel Z1c compounds (e.g., FF1-FF224) comprising aromatic boron-containing functionalities (e.g., F1-F12). In some embodiments, the present disclosure provides compounds that comprise a drug substance (e.g., X1) and at least one Z1c with aromatic boron-containing functionalities (e.g., aromatic boron-containing groups, Z1c scaffolds comprising FF1-FF224 and F1-F12). In some embodiments, the compounds disclosed comprise one or more molecular scaffolds (e.g., FF scaffolds). In some embodiments, the compounds comprise a drug substance. In at least some embodiments, the drug substance is a polypeptide or a small-molecule.

[0009] In at least some embodiments, the disclosed compounds have at least two aromatic boron-containing functionalities. In some embodiments, the compounds are selective towards specific sugars, such as glucose, while showing reduced affinity for other sugars and wherein there is at least two aromatic boron-containing functionalities in the aromatic boron-containing portion of the compounds. In certain embodiments, the aromatic boron-containing portion may be covalently conjugated, directly or indirectly, to a drug substance comprising an amine, a drug substance that is covalently conjugated to an amine containing linker, an amine configured to be covalently conjugated to a drug substance, NH₂, or OH (e.g., X1). In some embodiments, the drug substance is covalently conjugated to an amine containing linker and the amine group is conjugated to the aromatic boron-containing portion (Z1c). In certain embodiments the aromatic boron-containing portion (Z1c) has an architecture comprising of tethering groups (FF formulae) and aromatic boron containing groups that collectively make the aromatic boron-containing portion of the disclosed compounds.

[0010] In some embodiments, one or more Z1c may be linked (e.g., conjugated, connected) to a drug substance (e.g., X1) via one or more small-molecule linkers (e.g., Z1b) and/or one or more amino acids connected together using amide or peptide bonds (e.g., Z1a). In at least some embodiments, rotational constraining of the boron functionalities via the tethering group (e.g., FF formulae) enhances the binding affinity of the compounds (e.g., conjugates) towards specific diols (such as glucose) and away from other diols in the body and thereby provides selectivity to specific diols. In some embodiments, the compounds may exhibit therapeutic pharmacokinetics and/or pharmacodynamics in response to endogenous and/or exogenous small molecules in the body, such as glucose. Changes in the physiological concentration of glucose, result in the activation and/or release of the drug molecule or conversely, deactivation and/or sequestering of the drug molecule (e.g., a peptide hormone), and/or modulation of the activity of the drug molecule, through interaction of glucose with the boron-containing architectures conjugated to the drug molecule.

[0011] In some embodiments, the present disclosure provides a compound comprising X1 and one or more Z1c, or a tautomer, stereoisomer or a mixture of stereoisomers, or a pharmaceutically acceptable salt, or hydrate, or isotopic derivative thereof, wherein:
[0012] X1 comprises:
   [0013] i. NH₂ or OH (e.g. X1 is NH₂ or OH);
   [0014] ii. a drug substance comprising an amine;
   [0015] iii. a drug substance that is covalently conjugated to an amine containing linker; or
   [0016] iv. an amine configured to be covalently conjugated to a drug substance;
[0017] wherein each Z1c is independently selected from Formulae FF1-FF224; and wherein each Z1c is covalently conjugated, directly or indirectly, to an amine in X1 or to OH when X1 is OH.

[0018] In some embodiments, the compound is a molecular conjugate represented by Formula I, or a stereoisomer or a mixture of stereoisomers, or pharmaceutically acceptable salts:

[chemical structure]

[0019] wherein X1 comprises:
   [0020] i. NH₂ or OH (e.g. X1 is NH₂ or OH);
   [0021] ii. a polypeptide drug substance comprising an amine;
   [0022] iii. a polypeptide drug substance that is covalently conjugated to an amine containing linker; or
   [0023] iv. an amine configured to be covalently conjugated to a polypeptide drug substance;
[0024] each Z1c is independently selected from Formulae FF1-FF224 and covalently conjugated either directly, or via Z1a and/or Z1b, to X1;
[0025] each Z1a comprises 1 to 50 amino acids connected together using amide or peptide bonds;
[0026] each Z1b is a small-molecule linker;
[0027] each m′ is independently 0 or 1;
[0028] each n′ is independently 0 or a positive integer;
[0029] each o′ is independently an integer of 1 or greater;
[0030] each p′ is a positive integer; and
[0031] q′ is a positive integer of at least 1 and not more than two times the total number of amine groups in X1, with the proviso that when any of n′, o′, p′, or q′ is 2 or more, the corresponding groups Z1a, Z1b, and Z1c are independently selected and may be the same or different;
[0032] wherein each Z1c is independently covalently conjugated, directly or indirectly, to an amine of Z1a, to an amine of Z1b, or to X1; and wherein optionally the molecular conjugate may comprise one or more isotopes at any position of the molecular conjugate of Formula I.

[0033] In some embodiments, X1 comprises human insulin or a human insulin analogue comprising an A-chain and a B-chain, wherein the A-chain comprises a sequence selected from SEQ ID NOs 1 and 3 to 33, and the B-chain comprises a sequence selected from SEQ ID NOs 2 and 34 to 74, 24047, and 24048;
[0034] each Z1c is independently selected from FF1, FF10, FF12, FF14, FF15, FF114, FF115, FF116, FF163, FF193, FF194, FF203, and FF221-FF224 and covalently conjugated either directly, or indirectly via a linker (an indirect linker), to Z1a and/or Z1b, or to X1;
[0035] each Z1a is independently absent or independently comprises a sequence selected from K, GK, KGSH (SEQ ID NO:24049), KGSHK (SEQ ID NO:4238), KNSTK (SEQ ID NO:5085), GKASHK (SEQ ID NO:12414), GKEEEK (SEQ ID NO:12677), GKEEHK (SEQ ID NO:12680), GKGHSK (SEQ ID NO:13120), GKGSH (SEQ ID NO:24050), GKGSHK (SEQ ID NO:13198), GKGSTK (SEQ ID NO:13205), GKHENK (SEQ ID NO:13271), GKNSHK (SEQ ID NO:13982), GKNSTK (SEQ ID NO:13989), GKQSSK (SEQ ID NO:14380), GKYQFK (SEQ ID NO:15128), GKGSKK (SEQ ID NO:24045), GKKPGKK (SEQ ID NO:24046), GKGPSK (SEQ ID NO:24044), GKPSHKP (SEQ ID NO:24043), and GSHKGSHK (SEQ ID NO:24042);
[0036] each said linker is selected from FL1, FL3, FL4, and FL5;
[0037] each m′ is independently 0 or 1;
[0038] each n′ is independently 0, 1, 2, or 3;
[0039] each o′ is independently 1, 2, 3, 4, or 5;
[0040] each p′ is 1, 2, 3, 4, or 5; and
[0041] q′ is 1, 2, 3, or 4, wherein when any of n′, o′, p′, or q′ is 2 or more, the corresponding groups Z1a, Z1b, and Z1c are independently selected and may be the same or different; and
[0042] wherein each Z1c is independently covalently conjugated, directly or indirectly, to an amine of Z1a, to an amine of Z1b, or to X1.

[0043] In some embodiments, the compound of Formula I is selected from:

[chemical structure]

[0044] Also disclosed herein is a method of treating or preventing an endocrine and/or metabolic disease, in a subject in need thereof, comprising administering to said subject a compound of Formula (I), or a pharmaceutically acceptable salt thereof, or a pharmaceutical composition comprising a compound of Formula (I) or a pharmaceutically acceptable salt thereof. In some embodiments, the polypeptide drug substance is a polypeptide hormone such as insulin, an insulin analog, an incretin or an incretin analog. In some embodiments, the disease (e.g., disorder) is chosen from hyperglycemia, type 2 diabetes, impaired glucose tolerance, type 1 diabetes, obesity, metabolic syndrome X, or dyslipidemia, diabetes during pregnancy, pre-diabetes, Alzheimer's disease, MODY 1, MODY 2 or MODY 3 diabetes, mood disorders, and psychiatric disorders.

[0045] In at least one embodiment, the pharmaceutical composition of the present disclosure may be for use in (or in the manufacture of medicaments for) the treatment of diabetes in the subject. In at least one embodiment, a therapeutically-effective amount of a pharmaceutical composition of the present disclosure may be administered to a subject diagnosed with diabetes or metabolic disease. In at least one embodiment, the pharmaceutical composition of the present disclosure comprises at least one compound disclosed herein (e.g., Formula I, Z1c) and at least one additional component selected from pharmaceutically acceptable carriers, pharmaceutically acceptable vehicles, and pharmaceutically acceptable excipients.

[0046] In at least one embodiment, the present disclosure is directed to a human insulin analog comprising an A-chain and a B-chain, wherein the sequence of the A-chain comprises:

X_{aa′}X_{bb′}X_{cc′}X_{dd′}X_{ee′}X_{ff′}X_{gg′}VEQCCX_{hh′}X_{ii′}JCSLYQLENYCNX_{jj′}X_{kk′}X_{ll′}X_{mm′}X_{nn′}X_{oo′}X_{pp′} (SEQ ID NO:24015); and wherein the sequence of the B-chain comprises:
[0047] (i)

(SEQ ID NO: 24016)
XₐₐX_{bb}X_{cc}X_{dd}KXₑₑX_{ff}X_{gg}XₕₕXᵢᵢXⱼⱼKXₖₖXₗₗXₘₘXₙₙQHLCGSHLVEALYL
VCXₒₒXₚₚX_{qq}GFFYTXᵣᵣXₛₛXₜₜXᵤᵤXᵥᵥX_{ww},

[0048] wherein X_{aa′}, X_{bb′}, X_{cc′}, X_{dd′}, X_{ee′}, X_{ff′}, X_{gg′}, X_{hh′}, X_{ii′}, X_{jj′}, X_{kk′}, X_{ll′}, X_{mm′}, X_{nn′}, X_{oo′}, X_{pp′}, Xₐₐ, X_{bb}, X_{cc}, X_{dd}, Xₑₑ, X_{ff}, X_{gg}, Xₕₕ, Xᵢᵢ, Xⱼⱼ, Xₖₖ, Xₗₗ, Xₘₘ, Xₙₙ, Xₒₒ, Xₚₚ, X_{qq}, Xᵣᵣ, Xₛₛ, Xₜₜ, Xᵤᵤ, Xᵥᵥ, and X_{ww} are each independently either absent or selected from amino acid residues A, D, E, F, G, H, I, K, L, N, P, Q, R, S, T, V, Y and W,
[0049] (ii)

(SEQ ID NO: 24017)
XₐₐX_{bb}X_{cc}X_{dd}KPXₑₑX_{ff}X_{gg}XₕₕXᵢᵢXⱼⱼXₖₖXₗₗXₘₘXₙₙQHLCGSHLVEALYLV
CXₒₒXₚₚX_{qq}GFFYTXᵣᵣXₛₛXₜₜXᵤᵤXᵥᵥX_{ww},

[0050] wherein X_{aa′}, X_{bb′}, X_{cc′}, X_{dd′}, X_{ee′}, X_{ff′}, X_{gg′}, X_{hh′}, X_{ii′}, X_{jj′}, X_{kk′}, X_{ll′}, X_{mm′}, X_{nn′}, X_{oo′}, X_{pp′}, Xₐₐ, X_{bb}, X_{cc}, X_{dd}, X_{ff}, X_{gg}, Xₕₕ, Xᵢᵢ, Xⱼⱼ, Xₖₖ, Xₗₗ, Xₘₘ, Xₙₙ, Xₒₒ, Xₚₚ, X_{qq}, Xᵣᵣ, Xₛₛ, Xₜₜ, Xᵤᵤ, Xᵥᵥ, and X_{ww} are each independently either absent or selected from amino acid residues A, D, E, F, G, H, I, K, L, N, P, Q, R, S, T, V, Y and W, and wherein Xₑₑ is selected from amino acid residues A, E, F, H, I, K, L, N, P, Q, R, S, T, V, Y and W,
[0051] (iii)

(SEQ ID NO: 24018)
XₐₐX_{bb}X_{cc}X_{dd}KXₑₑX_{ff}X_{gg}XₕₕXᵢᵢXⱼⱼKXₖₖXₗₗXₘₘXₙₙQHLCGSHLVEALYLVC
XₒₒXₚₚX_{qq}GFFYTXᵣᵣXₛₛXₜₜXᵤᵤXᵥᵥX_{ww},

[0052] wherein X_{aa′}, X_{bb′}, X_{cc′}, X_{dd′}, X_{ee′}, X_{ff′}, X_{gg′}, X_{hh′}, X_{ii′}, X_{jj′}, X_{kk′}, X_{ll′}, X_{mm′}, X_{nn′}, X_{oo′}, X_{pp′}, Xₐₐ, X_{bb}, X_{cc}, X_{dd}, Xₑₑ, X_{ff}, X_{gg}, Xₕₕ, Xᵢᵢ, Xⱼⱼ, Xₖₖ, Xₗₗ, Xₘₘ, Xₙₙ, Xₒₒ, Xₚₚ, X_{qq}, Xᵣᵣ, Xₛₛ, Xₜₜ, Xᵤᵤ, Xᵥᵥ, and X_{ww}, are each independently either absent or selected from amino acid residues A, D, E, F, G, H, I, K, L, N, P, Q, R, S, T, V, Y, W and at least one of Xₑₑ, X_{ff}, X_{gg}, Xₕₕ, Xᵢᵢ, Xⱼⱼ is present and at least one of Xₑₑ, X_{ff}, X_{gg}, Xₕₕ, Xᵢᵢ, Xⱼⱼ is G,
[0053] (iv)

(SEQ ID NO: 24019)
XₐₐX_{bb}X_{cc}X_{dd}KXₑₑX_{ff}X_{gg}XₕₕXᵢᵢXⱼⱼKXₖₖXₗₗXₘₘXₙₙQHLCGSHLVEALYLVC
XₒₒXₚₚX_{qq}GFFYTXᵣᵣXₛₛXₜₜXᵤᵤXwX_{ww},

[0054] wherein X_{aa′}, X_{bb′}, X_{cc′}, X_{dd′}, X_{ee′}, X_{ff}, X_{gg′}, X_{hh′}, X_{ii′}, X_{jj′}, X_{kk′}, X_{ll′}, X_{mm′}, X_{nn′}, X_{oo′}, X_{pp′}, Xₐₐ, X_{bb}, X_{cc}, X_{dd}, Xₑₑ, X_{ff}, X_{gg}, Xₕₕ, Xᵢᵢ, Xⱼⱼ, Xₖₖ, Xₗₗ, Xₘₘ, Xₙₙ, Xₒₒ, Xₚₚ, X_{qq}, Xᵣᵣ, Xₛₛ, Xₜₜ, Xᵤᵤ, Xᵥᵥ, and X_{ww} are each independently either absent or selected from amino acid residues A, D, E, F, G, H, I, K, L, N, P, Q, R, S, T, V, Y, W and at least one of Xₑₑ, X_{ff}, X_{gg}, Xₕₕ, Xᵢᵢ, Xⱼⱼ is present and at least one of Xₑₑ, X_{ff}, X_{gg}, Xₕₕ, Xᵢᵢ, Xⱼⱼ is S, or
[0055] (v)

(SEQ ID NO: 24020)
XₐₐX_{bb}X_{cc}X_{dd}KXₑₑX_{ff}X_{gg}XₕₕXᵢᵢXⱼⱼKXₖₖXₗₗXₘₘXₙₙQHLCGSHLVEALYLVC
XₒₒXₚₚX_{gg}GFFYTXᵣᵣXₛₛXₜₜXᵤᵤXᵥᵥX_{ww},

[0056] wherein X_{aa′}, X_{bb′}, X_{cc′}, X_{dd′}, X_{ee′}, X_{ff′}, X_{gg′}, X_{hh′}, X_{ii′}, X_{jj′}, X_{kk′}, X_{ll′}, X_{mm′}, X_{nn′}, X_{oo′}, X_{pp′}, Xₐₐ, X_{bb}, X_{cc}, X_{dd}, Xₑₑ, X_{ff}, X_{gg}, Xₕₕ, Xᵢᵢ, Xⱼⱼ, Xₖₖ, Xₗₗ, Xₘₘ, Xₙₙ, Xₒₒ, Xₚₚ, X_{qq}, Xᵣᵣ, Xₛₛ, Xₜₜ, Xᵤᵤ, Xᵥᵥ, and X_{ww} are each independently either absent or selected from amino acid residues A, D, E, F, G, H, I, K, L, N, P, Q, R, S, T, V, Y, W and at least two of Xₑₑ, X_{ff}, X_{gg}, Xₕₕ, Xᵢᵢ, Xⱼⱼ are present and at least one of Xₑₑ, X_{ff}, X_{gg}, Xₕₕ, Xᵢᵢ, Xⱼⱼ is S, and another is G.

[0057] In some embodiments, one or more lysine residues and/or the N-terminus of the insulin A- or B-chain are covalently conjugated as described by Formula I. In some embodiments the insulins described herein are used as intermediate compounds for the manufacture of conjugates described by Formula I. In some embodiments, the insulins described herein are used in methods for preventing and/or treating an endocrine and/or metabolic disease, for example comprising administering any compound (e.g., modified insulin) of the embodiments described herein to a subject in need thereof, thereby treating the endocrine and/or metabolic disease.

### DETAILED DESCRIPTION OF THE DISCLOSURE

[0058] While aromatic boron-containing compounds (e.g., groups) can bind to diol containing molecules, achieving selectivity using aromatic boron-containing compounds (which can act as molecular sensors) is challenging because of their ability to bind various diols, including cis diols, to varying degrees. Improved binding affinity of aromatic boron-containing compounds (which can act as sensors) towards a specific vicinal diol of interest may result in a loss of selectivity.

[0059] Scaffolds that position the boron functionality (e.g., sensors) of the aromatic boron-containing compounds in a specific or particular ensemble of geometries can increase selectivity towards a specific vicinal diol while simultaneously maintaining affinity for the diol of interest. According to some embodiments, aromatic boron-containing compounds disclosed herein have different pendant groups on the aromatic boron-based scaffolds along with which specific scaffold geometries that impact binding to hydroxyl containing molecules.

[0060] According to some embodiments, the compounds of the present disclosure comprise aromatic boron-containing compounds that orient the boron functionalities in three dimensional space, so that the boron-containing compounds are spatially oriented to engage hexoses containing vicinal diols, such that the boron groups can appropriately engage the hydroxyls in the vicinal diol molecule and provide enhancement of selectivity. In some embodiments, the aromatic boron-containing compounds are modified with specific functional groups on the aromatic ring that, together with an appropriate or suitable scaffold, may provide higher selectivity and/or affinity for binding towards a vicinal diol of interest and away from other diols in the body.

[0061] In some embodiments, the aromatic boron-containing compounds are conjugated to a drug substance (e.g., small-molecule, polypeptide) wherein the aromatic boron-containing compounds provide intramolecular and intermolecular interactions with the drug substance and/or with proteins in the body, such as circulating proteins in the blood and/or plasma including albumin and/or globulins. In some embodiments, the selective binding of the sensors to specific vicinal diols changes the extent of those intramolecular and intermolecular bindings and thereby modulates the pharmacokinetics and overall activity of the drug substance in the body; this effect can be controlled by the level of the vicinal diols present.

[0062] In some embodiments the drug substance is a peptide hormone. In some embodiments, the peptide hormone is a human peptide hormone such as insulin, glucagon, or another incretin hormone. In some embodiments the sensors are selective towards the vicinal diols in glucose, and this selectivity is enhanced while maintaining affinity to glucose and simultaneously reducing affinity to other sugars in the blood. In some embodiments, the scaffolds as well as (e.g., in combination with) the pendant groups on the aromatic core of the boron-containing compounds enable controlling the overall activity and/or pharmacokinetics of the conjugated drug substances based on levels of glucose and/or other vicinal diols in the blood.

[0063] In some embodiments, the aromatic boron-containing compounds comprise specific scaffold molecules (i.e., FF structures) with conjugated boron functionalities (i.e., F1-F12 groups), wherein the scaffolds have been used to orient the boron functionalities in three dimensional geometries so that the boron functionalities are oriented near each other and within a distance that helps engage specific hydroxyl orientations of select hexoses such as glucose. Without wishing to be bound by theory, it is believed that the aromatic boron-containing compounds (e.g., molecules) disclosed herein enhance selectivity through at least one or more of the following three mechanisms: (1) the FF scaffold facilitates matching the orientation of the hydroxyl and/or alkoxy groups on boron groups in the aromatic boron-containing compounds and the hydroxyls in the vicinal diol molecule which enhances selectivity; (2) further selectivity gain is obtained by identifying specific functional groups attached to, or near, for example, the aromatic core of the boron-containing compound which impact the electronic structure of the aromatic boron-containing compound and thereby favor reversible binding to the vicinal diols at physiological pH; and (3) functional groups attached to the aromatic boron-containing compound (e.g., the sensor scaffold) help to provide steric hindrance to reduce binding to unwanted hexoses while maintaining binding to the sugar of interest such as glucose. These effects as combined together in the present disclosure provide desired or suitable selectivity of binding towards a vicinal diol-containing molecule of interest and away from other diols in the body.

[0064] In some embodiments, the aromatic boron-containing compounds are conjugated to a drug substance wherein the aromatic boron-containing compounds provide intramolecular and/or intermolecular interactions with proteins in the body. Such proteins may include circulating proteins in the blood and/or human plasma such as albumin, glycosylated proteins and/or immunoglobulins. In some embodiments the selective binding of the sensors to specific vicinal diols in a molecule of interest changes the extent of intramolecular and intermolecular bindings and thereby modulates the pharmacokinetics and overall activity of the drug substance in the body. In some embodiments the drug substance is a peptide hormone and in certain embodiments thereof the peptide hormone is an incretin hormone such as insulin and the vicinal diol containing molecule is glucose, but the present disclosure is not limited thereto.

### Definitions

[0065] Unless otherwise defined, all terms (including technical and scientific terms) used herein have the same meaning as commonly understood by one of ordinary skill in the art to which the present disclosure belongs. It will be further understood that terms, such as those defined in commonly used dictionaries, should be interpreted as having a meaning that is consistent with their meaning in the context of the relevant art and/or the present specification, and should not be interpreted in an idealized or overly formal sense, unless expressly so defined herein.

[0066] Unless specifically described herein, functional groups, functional moieties, and reactions referred to herein are understood to have meanings consistent with standard descriptions in and/or general principles of organic chemistry, for example, as described in Organic Chemistry, Thomas Sorrell, University Science Books, Sausalito, 1999; Larock, Comprehensive Organic Transformations, VCH Publishers, Inc., New York, 1989; Carruthers, Some Modern Methods of Organic Synthesis, 3^{rd} Edition, Cambridge University Press, Cambridge, 1987; Smith and March, March's Advanced Organic Chemistry, 5^{th} Edition, John Wiley & Sons, Inc., New York, 2001. Generic functional groups (such as alkyl, aryl, acetyl, etc.) encompass specific examples or species falling within those functional group categories as generally defined in the field of organic chemistry, and those having ordinary skill in the art are capable of identifying specific example embodiments of functional groups.

[0067] Unless specifically described herein, chemical terms, functional groups, and general terms used throughout the specification are identified in accordance with the Periodic Table of the Elements, CAS version, Handbook of Chemistry and Physics, 75^{th} Ed., inside cover. In certain embodiments the terms “a,” “an,” and “the” and similar referents used herein are to be construed to cover both the singular and the plural unless their usage in context indicates otherwise. The term “CAS #” as used herein is also referred to as CASRN or CAS Number, is a unique numerical identifier assigned by Chemical Abstracts Service (CAS) to every chemical substance described in the open scientific literature.

[0068] As used herein, nomenclature for compounds including organic compounds, can be given using common names, IUPAC, IUBMB, or CAS recommendations for nomenclature. One of skill in the art can readily ascertain the structure of a compound if given a name, either by systemic reduction of compound structure using naming conventions, or by commercially available software, such as CHEMDRAW™ (Cambridgesoft Corporation, U.S.A.).

[0069] The terminology used herein is for the purpose of describing embodiments and is not intended to be limiting of the present disclosure. It will be further understood that the terms “comprises,” “comprising,” “includes,” and “including,” when used in this specification, specify the presence of the stated features, integers, acts, operations, elements, and/or components, but do not preclude the presence or addition of one or more other features, integers, acts, operations, elements, components, and/or groups thereof. As used herein, the term “and/or” includes any and all combinations of one or more of the associated listed items. Expressions such as “at least one of,” when preceding a list of elements, modify the entire list of elements and do not modify the individual elements of the list.

[0070] As used herein, the terms “substantially,” “about,” and similar terms are used as terms of approximation and not as terms of degree, and are intended to account for the inherent deviations in measured or calculated values that would be recognized by those of ordinary skill in the art. The term “about” used throughout is used to describe and account for small variations. For instance, “about” may mean the numeric value may be modified by ±5%, ±4%, ±3%, ±2%, ±1%, ±0.5%, ±0.4%, ±0.3%, ±0.2%, ±0.1% or ±0.05%. Numeric values modified by the term “about” include the specific identified value. For example, “about 5.0” includes 5.0.

[0071] Further, the use of “may” when describing embodiments of the present disclosure refers to “one or more embodiments of the present disclosure.” As used herein, the terms “use,” “using,” and “used” may be considered synonymous with the terms “utilize,” “utilizing,” and “utilized,” respectively. Also, the term “exemplary” is intended to refer to an example or illustration.

[0072] Also, any numerical range recited herein is intended to include all sub-ranges of the same numerical precision subsumed within the recited range. For example, a range of “1 to 10” is intended to include all subranges between (and including) the recited minimum value of 1 and the recited maximum value of 10, that is, having a minimum value equal to or greater than 1 and a maximum value equal to or less than 10, such as, for example, 2 to 7. Any maximum numerical limitation recited herein is intended to include all lower numerical limitations subsumed therein, and any minimum numerical limitation recited in this specification is intended to include all higher numerical limitations subsumed therein. Accordingly, Applicant reserves the right to amend this specification, including the claims, to expressly recite any sub-range subsumed within the ranges expressly recited herein.

[0073] As used herein, “aromatic boron-containing group” refers to a compound having at least one boron atom covalently bonded to an aromatic group and/or a compound having at least one boron atom covalently incorporated within an aromatic group. The term “aromatic” as used herein may include “heterocycle,” “heterocyclyl,” or “heterocyclic.” As used herein the terms “heterocycle,” “heterocyclyl,” or “heterocyclic” each refer to an unsaturated 3- to 18-membered ring containing one, two, three, or four heteroatoms independently selected from nitrogen, oxygen, phosphorus, and sulfur. In some embodiments, the term “aromatic” may include an “aryl.” The term “aryl” as used herein refers to a mono-, bi-, or other multi carbocyclic, aromatic ring system with 5 to 14 ring atoms. The aryl group can optionally be fused to one or more rings selected from aryls, cycloalkyls, heteroaryls, and heterocyclyls. Exemplary aryl groups also include but are not limited to a monocyclic aromatic ring system, wherein the ring comprises 6 carbon atoms.

[0074] The term “heteroaryl” as used herein refers to a mono-, bi-, or multi-cyclic, aromatic ring system containing one or more heteroatoms, for example 1-3 heteroatoms, such as nitrogen, oxygen, and sulfur. Heteroaryls can be substituted with one or more substituents. Heteroaryls can also be fused to non-aromatic rings. Exemplary heteroaryl groups include, but are not limited to, a monocyclic aromatic ring, wherein the ring comprises 2-5 carbon atoms and 1-3 heteroatoms. In some embodiments, the aromatic boron-containing group may include but is not limited to aryl- and heteroaryl boronic acids, aryl and heteroaryl boronate esters, and/or boroxoles. Exemplary aromatic boron-containing groups useful according to certain embodiments, include, e.g., those described herein as FF1-FF224, F1-F10 and further include, e.g., those as disclosed in patent application PCT/US2021/025261 (filed Mar. 31, 2021) as compounds F1-F9, F12-F43, F500-F520; the disclosure of which is herein expressly incorporated by reference in its entirety.

[0075] The term “small-molecule linker” as used herein refers to a chemical group (e.g., scaffold, moiety) comprising a first attachment point toward X1 and a second attachment point toward Z1b, Z1a, or Z1c. In some embodiments, the first attachment point is toward X1 and the second attachment point is toward Z1c. In some embodiments, the first attachment point is toward X1 and the second attachment point is toward Zia. In some embodiments, the small molecule linker is a moiety/chemical group selected from Formulae IIa-IIai and Formulae IIIa-IIIai. In some embodiments, the small molecule linker is a moiety/chemical group selected from Formulae FL1-FL19 and an L- or D-amino acid comprising at least one amine group directly conjugated to Z1c, wherein an acid functional group of the amino acid is conjugated toward X1 in Formula I.

[0076] The term “indirect linker” as used herein refers to a chemical group (e.g., scaffold, moiety) comprising a first attachment point toward X1 and a second attachment point toward Z1b, Z1a, or Z1c. In some embodiments, the first attachment point is toward X1 and the second attachment point is toward Z1c. In some embodiments, the first attachment point is toward Z1a and the second attachment point is toward Z1c. In some embodiments, the indirect linker is a moiety/chemical group selected from Formulae FL1-FL19 and an L- or D-amino acid comprising at least one amine group directly conjugated to Z1c, wherein an acid functional group of the amino acid is conjugated toward Z1a or X1, independently, in Formula I.

[0077] The term “alkyl” as used herein refers to a saturated straight or branched hydrocarbon, such as a straight or branched group of 1-30 carbon atoms, referred to herein as C₁₋₃₀ alkyl. In some embodiments, the alkyl group is a C₁-C₂₂ alkyl group. In some embodiments, the alkyl group is a C₁-C₂₀ alkyl group. In some embodiments, the alkyl group is a C₁-C₁₈ alkyl group. In some embodiments, the alkyl group is a C₁-C₁₆ alkyl group. In some embodiments, the alkyl group is a C₁-C₁₄ alkyl group. In some embodiments, the alkyl group is a C₁-C₁₂ alkyl group. In some embodiments, the alkyl group is a C₁-C₁₀ alkyl group. In some embodiments, the alkyl group is a C₁-C₈ alkyl group. In some embodiments, the alkyl group is a C₁-C₆ alkyl group. In some embodiments, the alkyl group is a C₁-C₄ alkyl group. Exemplary alkyl groups include, but are not limited to, methyl, ethyl, propyl, isopropyl, 2-methyl-1-propyl, 2-methyl-2-propyl, 2-methyl-1-butyl, 3-methyl-1-butyl, 2-methyl-3-butyl, 2,2-dimethyl-1-propyl, 2-methyl-1-pentyl, 3-methyl-1-pentyl, 4-methyl-1-pentyl, 2-methyl-2-pentyl, 3-methyl-2-pentyl, 4-methyl-2-pentyl, 2,2-dimethyl-1-butyl, 3,3-dimethyl-1-butyl, 2-ethyl-1-butyl, butyl, isobutyl, t-butyl, pentyl, isopentyl, neopentyl, hexyl, heptyl, and octyl. In some embodiments, “alkyl” is a straight-chain hydrocarbon. In some embodiments, “alkyl” is a branched hydrocarbon.

[0078] The term “cycloalkyl” as used herein refers to a saturated or unsaturated cyclic, bicyclic, or bridged bicyclic hydrocarbon group of 3-16 carbons, or 3-8 carbons, referred to herein as “(C₃-C₅)cycloalkyl,” derived from a cycloalkane. Exemplary cycloalkyl groups include, but are not limited to, cyclohexanes, cyclohexenes, cyclopentanes, and cyclopentenes.

[0079] Cycloalkyl groups may be substituted with alkoxy, aryloxy, alkyl, alkenyl, alkynyl, amide, amino, aryl, arylalkyl, carbamate, carboxy, cyano, cycloalkyl, ester, ether, formyl, halogen, haloalkyl, heteroaryl, heterocyclyl, hydroxyl, ketone, nitro, phosphate, sulfide, sulfinyl, sulfonyl, sulfonic acid, sulfonamide and thioketone. Cycloalkyl groups can be fused to other cycloalkyl (saturated or partially unsaturated), aryl, or heterocyclyl groups, to form a bicycle, tetracycle, etc. The term “cycloalkyl” also includes bridged and spiro-fused cyclic structures which may or may not contain heteroatoms.

[0080] The term “acyl” as used herein refers to R—C(O)— groups such as, but not limited to, (alkyl)-C(O)—, (alkenyl)-C(O)—, (alkynyl)-C(O)—, (aryl)-C(O)—, (cycloalkyl)-C(O)—, (heteroaryl)-C(O)—, and (heterocyclyl)-C(O)—, wherein the group is attached to the parent molecular structure through the carbonyl functionality. In some embodiments, it is a C₁₋₁₀ acyl radical which refers to the total number of chain or ring atoms of the, for example, alkyl, alkenyl, alkynyl, aryl, cycloalkyl, or heteroaryl, portion plus the carbonyl carbon of acyl. For example, a C₄-acyl has three other ring or chain atoms plus carbonyl. In some embodiments, it is a C₁-C₂₂acyl group. In some embodiments, it is a C₁-C₂₀acyl group. In some embodiments, it is a C₁-C₁₈acyl group. In some embodiments, it is a C₁-C₁₆acyl group. In some embodiments, it is a C₁-C₁₄acyl group. In some embodiments, it is a C₁-C₁₂acyl group. In some embodiments, it is a C₁-C₁₀acyl group. In some embodiments, it is a C₁-C₈acyl group.

[0081] The term “haloalkyl” as used herein refers to an alkyl group substituted with one or more halogens. Examples of haloalkyl groups include, but are not limited to, trifluoromethyl, difluoromethyl, pentafluoroethyl, trichloromethyl, etc. In some embodiments, it is a C₁-C₂₂ haloalkyl group. In some embodiments, it is a C₁-C₂₀ haloalkyl group. In some embodiments, it is a C₁-C₁₈ haloalkyl group. In some embodiments, it is a C₁-C₁₆ haloalkyl group. In some embodiments, it is a C₁-C₁₄ haloalkyl group. In some embodiments, it is a C₁-C₁₂ haloalkyl group. In some embodiments, it is a C₁-C₁₀ haloalkyl group. In some embodiments, it is a C₁-C₈ haloalkyl group.

[0082] The term “aryl” as used herein refers to a mono-, bi-, or other multi-carbocyclic, aromatic ring system with 5 to 14 ring atoms. The aryl group can optionally be fused to one or more rings selected from aryls, cycloalkyls, heteroaryls, and heterocyclyls. The aryl groups of this present disclosure can be substituted with groups selected from alkoxy, aryloxy, alkyl, alkenyl, alkynyl, amide, amino, aryl, arylalkyl, carbamate, carboxy, cyano, cycloalkyl, ester, ether, formyl, halogen, haloalkyl, heteroaryl, heterocyclyl, hydroxyl, ketone, nitro, phosphate, sulfide, sulfinyl, sulfonyl, sulfonic acid, sulfonamide, and thioketone. Exemplary aryl groups include, but are not limited to, phenyl, tolyl, anthracenyl, fluorenyl, indenyl, azulenyl, and naphthyl, as well as benzo-fused carbocyclic moieties such as 5,6,7,8-tetrahydronaphthyl. Exemplary aryl groups also include but are not limited to a monocyclic aromatic ring system, wherein the ring comprises 6 carbon atoms.

[0083] “Isomers” means compounds having the same number and kind of atoms, and hence the same molecular weight, but differing with respect to the arrangement or configuration of the atoms in space.

[0084] “Stereoisomer” or “optical isomer” means a stable isomer that has at least one chiral atom or restricted rotation giving rise to perpendicular dissymmetric planes (e.g., certain biphenyls, allenes, and spiro compounds) and can rotate plane-polarized light. Because asymmetric centers and other chemical structure exist in the compounds of the disclosure which may give rise to stereoisomerism, the disclosure contemplates stereoisomers and mixtures thereof. The compounds of the disclosure and their salts include asymmetric carbon atoms and may therefore exist as single stereoisomers, racemates, and as mixtures of enantiomers and diastereomers. In some embodiments, such compounds will be prepared as a racemic mixture. In some embodiments, such compounds can be prepared or isolated as pure stereoisomers, e.g., as individual enantiomers or diastereomers, or as stereoisomer-enriched mixtures. As discussed in more detail below, individual stereoisomers of compounds may be prepared by synthesis from optically active starting materials containing the desired chiral centers or by preparation of mixtures of enantiomeric products followed by separation or resolution, such as conversion to a mixture of diastereomers followed by separation or recrystallization, chromatographic techniques, use of chiral resolving agents, or direct separation of the enantiomers on chiral chromatographic columns. Starting compounds of particular stereochemistry are either commercially available or are made by the methods described below and resolved by techniques well-known in the art.

[0085] The term “pharmaceutically acceptable salt(s)” refers to salts of acidic or basic groups that may be present in compounds used in the present compositions.

[0086] As used herein, “drug substance” refers to small-molecule compounds and/or polypeptide containing compounds. According to some embodiments, a drug substance suitable for use in the compounds and methods described herein is a therapeutically, prophylactically and/or diagnostically active drug substance.

[0087] It will be understood that, although terms such as “first,” “second,” “third,” etc., may be used herein to describe various elements (such as molecules, components, groups, and/or moieties, etc.), those elements should not be limited by these terms. These terms are merely used to distinguish one element from another element. Thus, a first element described below could be termed a second element without departing from the spirit and scope of the present disclosure. It will be understood that when an element or group is referred to as being “connected to,” “conjugated with,” “linked,” or “coupled to” another element or group, the two elements may be directly connected, or one or more intervening elements may be present. It will be understood that conjugations and linkages described herein have the option of being direct conjugations or direct linkages, unless expressly excluded or precluded by the context.

[0088] As used herein, the terms “directly” or “directly covalently conjugated” or “covalently conjugated directly” may be interchangeably used to indicate that a first group is “directly” or “directly covalently conjugated” or “covalently conjugated directly” to a second group, which means the first and second groups are covalently bonded together without additional intervening groups.

[0089] As used herein, the terms “indirectly” or “indirectly covalently conjugated” or “covalently conjugated indirectly” may be interchangeably used to indicate that a first group is “indirectly” or “indirectly covalently conjugated” or “covalently conjugated indirectly” to a second group, which means the first and second groups are covalently bonded together with at least one additional intervening group (e.g., a small-molecule, a linker, a spacer, a linear sequence of amino acids and/or nonlinear sequence of amino acids).

[0090] In at least some embodiments, one or more groups (e.g., X1a, Z1a, Z1b, Z1c) are covalently conjugated directly or indirectly to each other. For example, according to certain embodiments Z1c is covalently conjugated, directly or indirectly, to an amine in X1 or to OH when X1 is OH. As another example, according to certain embodiments one or more drug substances (X1) are covalently conjugated to one or more amine containing linkers. In some embodiments, X represents a point of covalent attachment either directly to an amine in X1 or to an amine that is covalently conjugated directly or indirectly to X1, or to OH when X1 is OH

[0091] In certain embodiment, each Z1c is independently covalently conjugated, directly or indirectly, to an amine of Z1a, to an amine of Z1b, or to X1.

[0092] As used herein, terms such as “attachment point toward [group],” “attachment to,” and “covalent linkage toward [group]” express that the indicated atom, attachment, or linkage is closer to the indicated group than the other attachment point or covalent linkage variables within the structure formula. In some embodiments an attachment point or covalent linkage may be directly adjacent to the indicated group, and in some embodiments other atoms or groups may be present therebetween.

[0093] As used herein, the term “percentage homology” refers to the percentage of sequence identity between two sequences after optimal alignment. Identical sequences have a percentage homology of 100%. Optimal alignment may be performed by homology alignment algorithms described by the search for similarity method of Pearson and Lipman, Proc. Natl. Acad. Sci. USA 85:2444 (1988), by general methods described for search for similarities by Neddleman and Wunsch, J. Mol. Biol. 48:443 (1970), including implementation of these algorithms or visual comparison. As used herein, “insulin A-chain” is the chain of insulin that has the highest percentage homology to the A-chain of wild-type human insulin. As used herein, “insulin B-chain” is the chain of insulin that has the highest percentage homology to the B-chain of wild-type human insulin.

[0094] In some embodiments, the terms “covalently connected,” “covalently conjugated,” or “through a covalent conjugation” may be interchangeably used to indicate that two or more atoms, groups, or chemical moieties are bonded or connected via a chemical linkage. In some embodiments, the chemical linkage (which in some embodiments may be referred to as a covalent linkage) may be (e.g., consist of) one or more shared electron pairs (e.g., in a single bond, a double bond, or a triple bond) between two atoms, groups, or chemical moieties.” In some embodiments, the chemical (covalent) linkage may further include one or more atoms or functional groups, and may be referred to using the corresponding name of that functional group in the art. For example, a covalent linkage including a —S—S— group may be referred to as a disulfide linkage; a covalent linkage including a —(C=O)— group may be referred to as a carbonyl linkage; a covalent linkage including a —(CF₂)— group may be referred to as a difluoromethylene linkage, etc. The type of linkage or functional group within the covalent bond is not limited unless expressly stated, for example when it is described as including or being selected from certain groups. The types or kinds of suitable covalent linkages will be understood from the description and/or context.

[0095] In some embodiments, side chains of amino acids may be covalently connected (e.g., linked or cross-linked) through any number of chemical bonds (e.g., bonding moieties) as generally described in Bioconjugate Techniques (Third edition), edited by Greg T. Hermanson, Academic Press, Boston, 2013. For example, the side chains may be covalently connected through an amide, ester, ether, thioether, isourea, imine, triazole, or any suitable covalent conjugation chemistry available in the art for covalently connecting one peptide, protein, or synthetic polymer to a second peptide, protein, or synthetic polymer. The term polymer includes polypeptide. The term “covalent conjugation chemistry” may refer to one or more functional groups included in the bonding moiety, and/or the chemical reactions used to form the bonding moiety.

[0096] The term “vicinal diol” refers to a group of molecules in which two hydroxyl groups occupy vicinal positions, that is, they are attached to adjacent atoms. Such molecules may include, but are not limited to, sugars such as hexoses, glucose, mannose and fructose.

[0097] In some embodiments, the term “albumin” means human serum albumin or a protein with at least 60% percentage homology to human serum albumin protein. It is to be understood that in some embodiments the albumin may be further chemically modified for the purposes of conjugation. In some embodiments, modifications may include one or more covalently connected linkers.

[0098] The term “treatment” is meant to include both the prevention and minimization of the referenced disease, disorder, or condition (i.e., “treatment” refers to both prophylactic and therapeutic administration of a compound of the present invention or a composition comprising a compound of the present invention unless otherwise indicated or clearly contradicted by context). The route of administration may be any route which effectively transports a compound of this disclosure to the desired or appropriate place in the body, such as parenterally, for example, subcutaneously, intramuscularly, orally, or intravenously. For parenterally administration, a compound of the disclosure is formulated analogously with the formulation of known insulins. Furthermore, for parenterally administration, a compound of this disclosure is administered analogously with the administration of known insulins and the physicians are familiar with this procedure. The amount of a compound of this disclosure to be administered, the determination of how frequently to administer a compound of this disclosure, and the election of which compound or compounds of this disclosure to administer, optionally together with another antidiabetic compound, is decided in consultation with a practitioner who is familiar with the treatment of the condition (e.g. diabetes) to be treated.

[0099] In some embodiments, “therapeutic composition” and “pharmaceutical composition” as used herein means a composition that is intended to have a therapeutic effect such as pharmaceutical compositions, genetic materials, biologics, and other substances. Pharmaceutical compositions may be configured to function in the body with therapeutic qualities; concentration may be altered to reduce the frequency of replenishment, and the like. In some embodiments “therapeutically effective amount” and “prophylactically effective amount” refer to an amount that provides a therapeutic benefit in the treatment, prevention, or management of a disease or an overt symptom of the disease. The therapeutically effective amount may treat a disease or condition, a symptom of disease, or a predisposition toward a disease, with the purpose to cure, heal, alleviate, relieve, alter, remedy, ameliorate, improve, or affect the disease, the symptoms of disease, or the predisposition toward disease. The set or specific amount that is therapeutically effective can be readily determined by an ordinary medical practitioner, and may vary depending on factors known in the art, such as, e.g. the type of disease, the patient's history and age, the stage of disease, and the administration of other therapeutic agents. In some embodiments, modified insulins described herein are delivered to the body by injection or inhalation, or by other routes, and can reversibly bind to soluble glucose in a non-depot form. In some embodiments, modified insulins described herein are released over an extended period of time from a local depot in the body or from bound forms to proteins in the serum such as albumin. In some embodiments, the release of modified insulin is accelerated at elevated glucose levels, and in some embodiments such release rate may be dependent on blood sugar levels or levels of other small molecules in the blood including diol containing molecules. In some embodiments the release, bioavailability, and/or solubility of modified insulins described herein is controlled as a function of blood or serum glucose concentrations or concentrations of other small molecules in the body.

[0100] Additionally, unless otherwise stated, structures described herein are also meant to include compounds that differ only in the presence of one or more isotopically enriched atoms. For example, compounds having the present structures except for the replacement of hydrogen by deuterium (²H) or tritium (³H), or the replacement of a carbon by a ¹³C- or ¹⁴C-carbon atom are within the scope of this disclosure. Such compounds may be useful as, for example, analytical tools, probes in biological assays, or therapeutic agents.

[0101] In some embodiments, functional groups can be covalently conjugated or linked via any suitable covalent conjugation chemistry (linker) that can be used to covalently conjugate one functional group or amino acid side chain to another functional group, non-limiting examples include an amide, an ester, an ether, a thioether, an isourea, an imine, and a triazole linker. In some embodiments functional groups are covalently conjugated through click chemistry reactions as defined in the art. These include, for example, cycloaddition reactions including but not limited to 3+2 cycloadditions, strain-promoted alkyne-nitrone cycloaddition, reactions of strained alkenes, alkene and tetrazine inverse-demand Diels-Alder, Copper(I)-Catalyzed Azide-Alkyne Cycloaddition (CuAAC), Strain-promoted azide-alkyne cycloaddition, Staudinger ligation, nucleophilic ring-opening reactions, and additions to carbon-carbon multiple bonds. Some of these reactions are described for example by H. C. Kolb, M. G. Finn and K. B. Sharpless (2001); Click Chemistry: Diverse Chemical Function from a Few Good Reactions, Angewandte Chemie International Edition 40 (11): 2004-2021; Kolb and Sharpless, Drug Discovery Today 8:1128-1137, 2003; Huisgen, R. Angew. Chem. Int. Ed. Engl. 1963, 2, 565; Agard, N. J.; Baskin, J. M.; Prescher, J. A.; Lo, A.; Bertozzi, C. R. ACS Chem. Biol. 2006, 1, 644. One skilled in the art will be capable of selecting suitable buffers, pH and reaction conditions for such click reactions. In some embodiments, covalent conjugation is the result of a “bioorthogonal reaction” as defined in the art. Such reactions are, for example, described by Sletten, Ellen M.; Bertozzi, Carolyn R. (2009). Bioorthogonal Chemistry: Fishing for Selectivity in a Sea of Functionality, Angewandte Chemie International Edition 48 (38): 6974-98.; Prescher, Jennifer A; Bertozzi, Carolyn R (2005). Chemistry in living systems, Nature Chemical Biology 1 (1): 13-21.

[0102] In some embodiments, functional groups may be linked using native chemical ligation as described for example by Dawson, P. E.; Muir, T. W.; Clark-Lewis, I.; Kent, S. B. (1994) Synthesis of proteins by native chemical ligation, Science 266 (5186): 776-778. As used herein, terms such as “linkage,” “covalent conjugation,” etc. may refer to any of the chemistries described above in some embodiments. The terms “amine,” “amino group,” and/or “amine group,” when used to describe part of a covalent bond or connectivity, may be interchangeably used to indicate an amino group or an amine group to which the described element is covalently linked. In some embodiments, the amino group or amine group may be a primary amine, a secondary amine, or a fragment such as NH—⊕ to which a conjugation is made and described.

[0103] In some embodiments, the amino group or amine group may be the NH₂ group at the N-terminus of a peptide or peptide chain, or the NH₂ group of a lysine side chain, but embodiments of the present disclosure are not limited thereto. In some embodiments, the connectivity of a first group to a second group is described by reference to an amine or amino group, originating from the second group, that is part of a covalent linkage between the first group and the second group. For example, an amine of a lysine side chain on X1 may be referred to as an amine, and furthermore may be described as being conjugated through an amide bond in order to specify the structure and connectivity of the functional groups that constitute the covalent bond. If a covalent linkage is via an amine bond or amine linkage, then it is referred to as an amine linkage. It is to be understood that a carbonyl connected to an amine (e.g., a (C═O)—NH moiety) constitutes an amide bond, and thus by definition, an amine linkage is not directly connected to a carbonyl group. Stated another way, the terms “amide bond” and/or “amide linkage,” when used to describe a covalent bond or connectivity, may be interchangeably used to indicate a carbonyl connected to an amine (e.g., a (C═O)—NH moiety).

[0104] In some embodiments further modifications include attachment of a chemical entity (e.g., moiety or functional group) such as a carbohydrate group, one or more cis-diol containing groups, one or more phosphate groups, one or more catechol groups, a farnesyl group, an isofarnesyl group, a fatty acid group, or a linker for conjugation, functionalization, or other modifications meant to impact the pharmacokinetics, pharmacodynamics, and/or biophysical solution characteristics of insulin.

[0105] In some embodiments, a compound, such as a molecular conjugate, includes a human peptide hormone (e.g., as X1). In some embodiments, the peptide hormone is a polypeptide hormone of the human pancreas. In some embodiments, X1 in Formula I is NH₂. In some embodiments, a compound of Formula I is conjugated to a drug substance via an optional covalent-spacer. In some embodiments, a compound, such as a molecular conjugate, includes a human insulin or a human insulin analogue. In some embodiments, two different amine groups in insulin are covalently conjugated to as described by Formula I.

[0106] It will be understood that “human peptide hormone,” “polypeptide hormone of the human pancreas,” “Insulin,” “human insulin,” “modified insulin,” and “human insulin analogue” may be used interchangeably in some of the described embodiments; that is, for example, in certain embodiments “human insulin analogue” may instead be used in embodiments described as using human insulin. In some embodiments a compound, such as a molecular conjugate, includes a human insulin or a human insulin analogue. In some embodiments, a molecular conjugate includes a human insulin or a human insulin analogue as described by Formula I for p′=1 wherein a single amino group in insulin is conjugated to as described by Formula I. In some embodiments, the amino group is the N-terminus of the B-chain of insulin or an amino group of the side chain of a lysine. In some embodiments, two or more different amine groups in insulin are each independently covalently conjugated to as described by Formula I. In some embodiments, at least one amine groups is the N-terminus of the B-chain of insulin. In some embodiments, amino groups comprise amino groups of side chains of lysine residues in insulin.

[0107] Various suitable modifications of the peptide hormone (e.g., human polypeptide hormone, for example, Insulin), known to those having ordinary skill in the art, are included in the scope of the disclosure. In some embodiments, the polypeptide of Z1a or the optionally extended polypeptide at the N-terminus of B-chain or C-terminus of A-chain of insulin contain sequences with up to 70% sequence homology to a human polypeptide sequence. In some embodiments, the polypeptide of Z1a or the optionally extended polypeptide at the N-terminus of B-chain or C-terminus of A-chain of insulin contain one or more lysine residues that are optionally next to a proline residue, such that the proline is C-terminal to lysine. In some embodiments, the amino group of lysine residues is each independently conjugated as described by Formula I.

[0108] In some embodiments, insulin is further modified through conjugation to a sugar- or diol-containing molecule. In some embodiments, the human polypeptide hormone is a dual or triple hybrid peptide comprising sequences of two or more human peptide hormones and which can act through multiple receptors; for example, a glucose-dependent insulinotropic polypeptide (GIP) and GLP-1 receptor agonist or GLP-1/GIP/glucagon triple agonist. In some embodiments, the human polypeptide hormone is a gut hormone. In some embodiments, the human polypeptide hormone is chosen from c-peptide, adrenocorticotropic hormone (ACTH), amylin, angiotensin, atrial natriuretic peptide (ANP), calcitonin, cholecystokinin (CCK), gastrin, ghrelin, glucagon, growth hormone, follicle-stimulating hormone (FSH), insulin, leptin, melanocyte-stimulating hormone (MSH), oxytocin, parathyroid hormone (PTH), prolactin, renin, somatostatin, thyroid-stimulating hormone (TSH), thyrotropin-releasing hormone (TRH), vasopressin, vasoactive intestinal peptide, a neuropeptide, a peptide hormone that impacts cardiovascular health or appetite, a hybrid of one or more of these peptides, and an analogue of one of these peptides. In some embodiments, compounds comprise a human polypeptide hormone further modified, for example, through the covalent conjugation to polymers, XTEN protein sequences or aliphatic chains. In some embodiments, polymer modified compounds have a longer circulation time in the blood. In some embodiments, polymer modified compounds, such long-acting variants require once a day injection, or one a week injection or once a month injection. In some embodiments, a human polypeptide hormone or the analogue thereof includes one or more L- or D-amino acids that are each independently one of the twenty canonical amino acids or a non-canonical amino acid.

[0109] In some embodiments, a human polypeptide hormone or the analogue thereof includes one or more residues that are 2-aminoisobutyric acid. In some embodiments, the C-terminus of the B-chain of insulin is covalently conjugated to the N-terminus of the A-chain. In some embodiments, the C-terminus of the B-chain of insulin is covalently conjugated to the N-terminus of the A-chain and the connecting peptide is a C-peptide. In some embodiments, the C-terminus of the B-chain of insulin is covalently conjugated to the N-terminus of the A-chain and the connecting peptide is a C-peptide and further includes any intermediate compounds that comprise a conjugate of Formula I. In some embodiments, insulin includes insulin lispro, or a glargine-type of modification, or any suitable modification to human insulin analogue that impacts the pharmacokinetics or half-life of insulin in the blood.

[0110] In some embodiments, the polypeptide hormone is glucagon. In some embodiments, glucagon has additional mutations and modifications that are known to impact solubility and solution stability of glucagon. In some embodiments, a compound, such as a molecular conjugate, comprises a conjugation of a Z1a to the N-terminus of the B-chain of insulin through a peptide bond, and at least one additional conjugation described by Formula I to insulin. In some embodiments, the additional conjugation is to a lysine residue in insulin. In some embodiments, at least one such lysine is a residue between position 15 and the C-terminus of the B-chain of insulin. In some embodiments, the lysine residue is optionally next to a proline, glycine, arginine, threonine or serine. In some embodiments, one or more amino acids in Formula I is a D-amino acid. In some embodiments, any secondary or primary amine in a compound, such as a molecular conjugate described by Formula I, is each independently optionally acetylated. In some embodiments, a compound, such as a molecular conjugate has a polypeptide hormone X1 further conjugated to a drug molecule, an imaging agent, a chelator, a contrast agent, a radioactive isotope or a molecule that engages immune cells. In some embodiments, X1 is a polypeptide hormone comprising a peptide ligand that binds to an extracellular protein receptor. In some embodiments, X1 comprises a polypeptide analogue of a human polypeptide hormone that has at least 50% homology to a natural human polypeptide hormone. In some embodiments, X1 is an analogue of human insulin with up to 10 additional residues added to the A-chain or the B-chain of insulin.

[0111] In some embodiments, the term “glucose responsiveness” refers to the change in activity in the presence and absence of glucose or in a difference of lower levels and higher levels of glucose (e.g, 3 mM glucose vs 20 mM glucose). In some embodiments the activity of a conjugated insulin is assessed by the concentration of insulin (in nanomolar units (nM) of insulin) required to induce the half maximum response (EC50) in a cell-based assay. Lower EC50 concentrations of conjugated insulins have a higher activity than insulins with higher EC50 concentrations (e.g., an insulin with an EC50 of 3 nM is more active than an insulin with an EC50 of 50 nM). A “glucose response” is observed when the insulin changes from a less active EC50 (higher nM) to a more active EC50 (lower nM) in the absence and presence of glucose or in lower and higher levels of glucose, respectively.

[0112] In some embodiments, the compound, such as a molecular conjugate, comprises one or more L- or D-artificial amino acids which are not one of the twenty naturally occurring amino acids. In some embodiments, the side chains of such artificial amino acids can be covalently conjugated through a number of reactions, including bio-orthogonal reactions such as, for example, described by: Rostovtsev, V. V., Green, L. G., Fokin, V. V. & Sharpless, K. B. A stepwise huisgen cycloaddition process: copper(I)-catalyzed regioselective “ligation” of azides and terminal alkynes. Angew. Chem. Int. Ed. 41, 2596-2599 (2002), or by: Liang, Y., Mackey, J. L., Lopez, S. A., Liu, F. & Houk, K. N. Control and design of mutual orthogonality in bioorthogonal cycloadditions. J. Am. Chem. Soc. 134, 17904-17907 (2012). In some embodiments, Z1a contains one or more L- or D-artificial amino acids that are not one of the twenty naturally occurring amino acids. In some embodiments, the side chains of two amino acids in Z1a are covalently conjugated together through a triazole bond.

[0113] Insulin hormone is an important regulator of blood glucose (sugar) levels. In a normal individual, insulin is present and, when released by the pancreas, it acts to reduce blood sugar levels, for example, by binding to and activating the insulin receptor, triggering glucose absorption by liver, fat, and skeletal muscle cells. Diabetes mellitus (DM), commonly referred to as diabetes, is a group of metabolic diseases characterized by the persistence of high blood sugar levels over a prolonged period.

[0114] As used herein, “insulin” encompasses both wild-type and altered forms of insulin capable of binding to and activating the insulin receptor, or capable of causing a measurable reduction in blood glucose when administered in vivo and encompasses both wild-type and altered forms of human insulin capable of binding to and activating the human insulin receptor, or capable of causing a measurable reduction in blood glucose when administered in vivo to a human.

[0115] In some embodiments, insulin includes insulin from any species whether in purified, synthetic, or recombinant form and includes human insulin, porcine insulin, bovine insulin, sheep insulin and rabbit insulin. In some embodiments, insulin has two chains: a B- and an A-chain. In some embodiments, the chains are connected together through peptides such as, for example, c-peptide as is known in the art, or a shortened version of the c-peptide, and in other embodiments the insulin may be provided as a proinsulin (insulin precursor) that can be further processed into mature insulin. A variety of altered forms of insulin are known in the art and may be chemically altered such as by addition of a chemical moiety such as a PEG group or a fatty acyl chain. Altered insulins may be mutated including additions, deletions or substitutions of amino acids. In some embodiments the term “desB30” refers to an insulin lacking the B30 amino acid residue.

[0116] In some embodiments, insulin analogues include insulin that is chemically altered as compared to wild type human insulin, such as, but not limited to, by addition of a chemical moiety such as a PEG group or a fatty acyl chain. In some embodiments, altered insulins or insulin analogues may be mutated including additions, deletions or substitutions of amino acids. Different protomers of insulin may result from these changes and be incorporated into some embodiments. In some embodiments, active forms of insulins have fewer than 11 such modifications (e.g., 1-4, 1-3, 1-9, 1-8, 1-7, 1-6, 2-6, 2-5, 2-4, 1-5, 1-2, 2-9, 2-8, 2-7, 2-3, 3-9, 3-8, 3-7, 3-6, 3-5, 3-4, 4-9, 4-8, 4-7, 4-6, 4-5, 5-9, 5-8, 5-7, 5-6, 6-9, 6-8, 6-7, 7-9, 7-8, 8-9, 9, 8, 7, 6, 5, 4, 3, 2 or 1). As used herein, the wild-type sequence of human insulin (A-chain and B-chain), has an A-chain with the amino acid sequence GIVEQCCTSICSLYQLENYCN (SEQ ID NO:1), and a B-chain having the amino acid sequence FVNQHLCGSHLVEALYLVCGERGFFYTPKT (SEQ ID NO:2).

[0117] Human insulin differs from rabbit, porcine, bovine, and sheep insulin in amino acids A8, A9, A10, and B30, which are in order the following: Thr, Ser, Ile, Thr for human; Thr, Ser, Ile, Ser for rabbit; Thr, Ser, Ile, Ala for porcine; Ala, Gly, Val, Ala for sheep; and Ala, Ser, Val, Ala for bovine. In some embodiments, a modified insulin may be mutated at position B1, B2, B28 or B29, or at positions B28 and B29 of the B-chain. In some embodiments, a modified insulin may be mutated at A1, A2, A21 or other positions of the A-chain. For example, insulin lispro is a fast-acting modified insulin in which the lysine and proline residues on the C-terminal end of the B-chain have been reversed. Insulin aspart is a fast-acting modified insulin in which proline has been substituted with aspartic acid at position B28. It is contemplated in some embodiments of the present disclosure that insulins mutated at B28 and B29 may further include additional mutations. For example, insulin glulisine is a fast-acting modified insulin in which aspartic acid has been replaced by a lysine residue at position B3, and lysine has been replaced by a glutamic acid residue at position B29. In some embodiments, longer acting and higher stability insulin analogs are covalently modified as described by Formula I, and may contain mutations such as tyrosine at A14 replaced with glutamic acid, the tyrosine at B16 replaced with histidine, and the phenylalanine at B25 replaced with a histidine.

[0118] In some embodiments, the isoelectric point of insulins herein may be shifted relative to wild-type human insulin using any suitable method, for example by addition or substitution of suitable amino acids. In some embodiments, the isoelectric point of the modified insulins may be modulated by glucose (e.g., by interaction with glucose). For example, insulin glargine is a basal insulin in which two arginine residues have been added to the C-terminus of the B-peptide, and A21 has been replaced by glycine. In some embodiments, the insulin may not have one or more of the residues B1, B2, B3, B26, B27, B28, B29, and B30 (e.g., the insulin may be a deletion mutant at one or more of the listed residues). In some embodiments, the insulin molecule contains up to five additional amino acid residues on the N- or C-terminus of the A-chain or B-chain. In some embodiments, one or more amino acid residues are located at positions A1, A21, B1, B29, B30 and/or B31 or are missing. In some embodiments, an insulin molecule of the present disclosure is mutated such that one or more amino acids are replaced (substituted) with their acidic forms. In some embodiments, an asparagine is replaced with aspartic acid or glutamic acid. In some embodiments, glutamine is replaced with aspartic acid or glutamic acid. In some embodiments, A21 may be an aspartic acid, B3 may be an aspartic acid, or both positions may contain an aspartic acid. One skilled in the art will recognize that it is possible to make any previously reported, or widely accepted mutations or modifications to insulin that retains biological activity, and that such an insulin analogue can be used in embodiments of the present disclosure. In some embodiments, an insulin may be linked at any position to a fatty acid, or acylated with a fatty acid at any amino group, including those on lysine side chains and the alpha-amino group on the N-terminus of insulin, and the fatty acid may include a C8, C9, C10, C11, C12, C14, C15, C16, C17, or C18 chain. In some embodiments, the fatty acid chain is 8-20 carbons long. In some embodiments, is an insulin detemir, in which a myristic acid is covalently conjugated to lysine at B29, and B30 is deleted or absent. In some embodiments, position B28 of the insulin molecule is lysine and the epsilon(s)-amino group of this lysine is conjugated to a fatty acid.

[0119] In some embodiments, the N- or C-terminal end of the A- or B-chain of the modified insulin is ligated using a peptide ligase. In some embodiments, a polypeptide is added to the C-terminus of the insulin A- and/or B-chain or to the N-terminus of insulin A- and/or B-chain using a protein ligase, and in some embodiments thereof the ligase is chosen from sortases, butelases, Trypsiligases, Subtilisins, Peptiligases or enzymes having at least 75% homology to these ligases. In some embodiments, ligation is achieved through expressed protein ligation as described in: Muir T W, Sondhi D, Cole P A. “Expressed protein ligation: a general method for protein engineering.” Proc Nat Acad Sci USA. 1998; 95(12):6705-6710. In some embodiments, the polypeptide is linked to the modified insulin using Staudinger ligation, utilizing the Staudinger reaction and as described for example in Nilsson, B. L.; Kiessling, L. L.; Raines, R. T. (2000). “Staudinger ligation: A peptide from a thioester and azide”. Org. Lett. 2 (13): 1939-1941. In some embodiments, a polypeptide is conjugated to the modified insulin using Ser/Thr ligation as, for example, described in: Zhang Y, Xu C, Kam H Y, Lee C L, Li X. 2013, “Protein chemical synthesis by serine/threonine ligation.” Proc. Natl. Acad. Sci. USA. 17:6657-6662. In some embodiments, the B-chain itself has less than 32 amino acids or 34 amino acids, and in some embodiments the insulin has 4 disulfide bonds instead of 3. There are disulfide bonds present in the A and B chains of insulin. For example, a disulfide bond exists between the cysteine at position 6 of SEQ ID NO:1 and the cysteine at position 11 of SEQ ID NO:1, a disulfide bond exists between the cysteine at position 7 of SEQ ID NO:1 and the cysteine at position 7 of SEQ ID NO:2, and a disulfide bond exists between the cysteine at position 20 of SEQ ID NO:1 and the cysteine at position 19 of SEQ ID NO:2.

[0120] In some embodiments, a modified insulin of the present disclosure comprises one or more mutations and/or chemical modifications including, but not limited to one of the following insulin molecules: N^{εB29}-octanoyl-Arg^{B0}Gly^{A21}Asp^{B3}Arg^{B31}Arg^{B32}-HI, N^{εB29}-octanoyl-ArgB³¹ArgB³²—HI, N_{εB29}-octanoyl-Arg^{A0}Arg^{B31}Arg^{B32}-HI, N^{εB28}-myristoyl-Gly^{A21}Lys^{B28}Pro^{B29}Arg^{B31}Arg^{B32}-HI, N^{εB28}-myristoyl-Gly^{A21}Gln^{B3}Lys^{B28}PrO^{B30}Arg^{B31}Arg^{B32}-HI, N^{εB28}-myristoyl-Arg^{A0}Gly^{A21}Lys^{B28}Pro^{B29}Arg^{B31}Arg^{B32}-HI, N^{εB28}-myristoyl-Arg^{A0}Gly^{A21}Gln^{B3}Lys^{B28}Pro^{B29}Arg^{B31}Arg^{B32}-HI, N^{εB28}-myristoyl-Arg^{A0}Gly^{A21}Asp^{B3}Lys^{B28}Pro^{B29}Arg^{B31}Arg^{B32}-HI, N^{εB28}-myristoyl-Lys^{B28}Pro^{B29}Arg^{B31}Arg^{B32}-HI, N^{εB28}-myristoyl-Arg^{A0}Lys^{B28}Pro^{B29}Arg^{B31}Arg^{B32}-HI, N^{εB28}-octanoyl-Gly^{A21}Lys^{B28}Pro^{B29}Arg^{B31}Arg^{B32}-HI, N^{εB28}-octanoyl-Gly^{A21}Gln^{B3}Lys^{B28}Pro^{B29}Arg^{B31}Arg^{B32}-HI, N^{εB28}-octanoyl-Arg^{A0}Gly^{A21}Lys^{B28}Pro^{B29}Arg^{B31}Arg^{B32}-HI, N^{εB29}-palmitoyl-HI, N^{εB29}-myristoyl-HI, N^{εB28}-palmitoyl-Lys^{B28}Pro^{B29}-HI, N^{εB28}-myristoyl-Lys^{B28}Pro^{B29}-HI, N^{εB29}-palmitoyl-des(B30)-HI, N^{εB30}-myristoyl-Thr^{B29}Lys^{B30}-HI, N^{εB30}-palmitoyl-Thr^{B29}Lys^{B30}-HI, N^{εB29}-(N-palmitoyl-γ-glutamyl)-des(B30)-HI, N^{εB29}-(N-lithocolyl-γ-glutamyl)-des(B30)-HI, N^{εB29}-(ω-carboxyheptadecanoyl)-des(B30)-HI, N^{εB29}-(ω-carboxyheptadecanoyl)-HI, N^{εB29}-octanoyl-HI, N^{εB29}-myristoyl-Gly^{A21}Arg^{B31}Arg^{B31}-HI, N^{εB29}-myristoyl-Gly^{A21}Gln^{B3}Arg^{B31}Arg^{B32}-HI, N_{εB29}-myristoyl-Arg^{A0}Gly^{A21}Arg^{B31}Arg^{B32}-HI, N^{εB29}-Arg^{A0}Gly^{A21}Gln^{B3}Arg^{B31}Arg^{B32}-HI, N^{εB29}-myristoyl-Arg^{A0}Gly^{A21}Asp^{B3}Arg^{B31}Arg^{B32}-HI, N^{εB29}-myristoyl-Arg^{B31}Arg^{B32}-HI, N^{εB29}-myristoyl-Arg^{A0}Arg^{B31}Arg^{B32}-HI, N^{εB29}-octanoyl-Gly^{A21}Arg^{B31}Arg^{B32}-HI, N^{εB29}-octanoyl-Gly^{A21}Gln^{B3}Arg^{B31}Arg^{B32}-HI, N^{εB29}-octanoyl-Arg^{A0}Gly^{A21}Arg^{B31}Arg^{B32}-HI, N^{εB29}-octanoyl-Arg^{A0}Gly^{A21}Gln^{B3}Arg^{B31}Arg^{B32}-HI, N^{εB28}-octanoyl-Arg^{A0}Gly^{A21}Gln^{B3}Lys^{B28}Pro^{B29}Arg^{B31}Arg^{B32}-HI, N^{εB28}-octanoyl-Arg^{A0}Gly^{A21}Asp^{B3}Lys^{B28}Pro^{B29}Arg^{B31}Arg^{B32}-HI, N^{εB28}-octanoyl-Lys^{B28}Pro^{B29}Arg^{B31}Arg^{B32}-HI, N^{εB28}-octanoyl-Arg^{A0}Lys^{B28}Pro^{B29}Arg^{B31}Arg^{B32}-HI. N^{εB29}-pentanoyl-Gly^{A21}Arg^{B31}Arg^{B32}-HI, N^{αB1}-hexanoyl-Gly^{A21}Arg^{B31}Arg^{B32}-HI, N^{αA1}-heptanoyl-Gly^{A21}Arg^{B31}Arg^{B32}-HI, N^{εB29}-octanoyl-N^{αB1}-octanoyl-Gly^{A21}Arg^{B31}Arg^{B32}-HI, N^{εB29}-propionyl-N^{αA1}-propionyl-Gly^{A21}Arg^{B31}Arg^{B32}-HI, N^{αA1}-acetyl-N^{αB1}-acetyl-Gly^{A21}Arg^{B31}Arg^{B32}-HI, N^{εB29}-formyl-N^{αA1}-formyl-N^{αB1}-formyl-Gly^{A21}Arg^{B31}Arg^{B32}-HI, N^{εB29}-formyl-des(B26)-HI, N^{αB1}-acetyl-Asp^{B28}-HI, N^{εB29}-propionyl-N^{αA1}-propionyl-N^{αB1}-propionyl-Asp^{B1}Asp^{B3}Asp^{B21}-HI, N^{εB29}-pentanoyl-Gly^{A21}-HI, N^{αB1}-hexanoyl-Gly^{A21}-HI, N^{αA1}-heptanoyl-Gly^{A21}-HI, N^{εB29}-octanoyl-N^{αB1}-octanoyl-Gly^{A21}-HI, N^{εB29}-propionyl-N^{αA1}-propionyl-Gly^{A21}-HI, N^{αA1}-acetyl-N^{αB1}-acetyl-Gly^{A21}-HI, N^{εB29}-formyl-N^{αA1}-formyl-N^{αB1}-formyl-Gly^{A21}-HI, N^{εB29}-butyryl-des(B30)-HI, N^{αB31}-butyryl-des(B30)-HI, N^{αA1}-butyryl-des(B30)-HI, N^{εB29}-butyryl-N^{αB31}-butyryl-des(B30)-HI, N^{εB29}-butyryl-N^{αA1}-butyryl-des(B30)-HI, N^{αA1}-butyryl-N^{αB31}-butyryl-des(B30)-HI, N^{εB29}-butyryl-N^{αA1}-butyryl-N^{αB31}-butyryl-des(B30)-HI, Lys^{B28}Pro^{B29}-HI (insulin lispro), Asp^{B28}-HI (insulin aspart), Lys^{B3}Glu^{B29}-HI (insulin glulisine), Arg^{B31}Arg^{B32}-HI (insulin glargine), N^{εB29}-myristoyl-des(B30)-HI (insulin detemir), Ala^{B26}-HI, Asp^{B1}-HI, Arg^{A0}-HI, Asp^{B1}Glu^{B13}-HI, Gly^{A21}-HI, Gly^{A21}Arg^{B31}Arg^{B32}-HI, Arg^{A0}Arg^{B31}Arg^{B32}-HI, Arg^{A0}Gly^{A21}Arg^{B31}Arg^{B32}-HI, des(B30)-HI, des(B27)-HI, des(B28-B30)-HI, des(B1)-HI, des(B1-B3)-HIN^{εB29}-tridecanoyl-des(B30)-HI, N^{εB29}-tetradecanoyl-des(B30)-HI, N^{εB29}-decanoyl-des(B30)-HI, N^{εB29}-dodecanoyl-des(B30)-HI, N^{εB29}-tridecanoyl-Gly^{A21}-des(B30)-HI, N^{εB29}-tetradecanoyl-Gly^{A21}-des(B30)-HI, N^{εB29}-decanoyl-Gly^{A21}-des(B30)-HI, N^{εB29}-dodecanoyl-Gly^{A21}-des(B30)-HI, N^{εB29}-tridecanoyl-Gly^{A21}Gln^{B3}-des(B30)-HI, N^{εB29}-tetradecanoyl-Gly^{A21}Gln^{B3}-des(B30)-HI, N^{εB29}-decanoyl-Gly^{A21}-Gln^{B3}-des(B30)-HI, N^{εB29}-dodecanoyl-Gly^{A21}-Gln^{B3}-des(B30)-HI, N^{εB29}-tridecanoyl-Ala^{A21}-des(B30)-HI, N^{εB29}-tetradecanoyl-Ala^{A21}-des(B30)-HI, N^{εB29}-decanoyl-Ala^{A21}-des(B30)-HI, N^{εB29}-dodecanoyl-Ala^{A21}-des(B30)-HI, N^{εB29}-tridecanoyl-Ala^{A21}-Gln^{B3}-des(B30)-HI, N^{εB29}-tetradecanoyl-Ala^{A21}Gln^{B3}-des(B30)-HI, N^{εB29}-decanoyl-Ala^{A21}Gln^{B3}-des(B30)-HI, N^{εB29}-dodecanoyl-Ala^{A21}Gln^{B3}-des(B30)-HI, N^{εB29}-tridecanoyl-Gln^{B3}-des(B30)-HI, N^{εB29}-tetradecanoyl-Gln^{B3}-des(B30)-HI, N^{εB29}-decanoyl-Gln^{B3}-des(B30)-HI, N^{εB29}-dodecanoyl-Gln^{B3}-des(B30)-HI, N^{εB29}-Z1-Gly^{A21}-HI, N^{εB29}-Z2-Gly^{A21}-HI, N^{εB29}-Z4-Gly^{A21}-HI, N^{εB29}-Z3-Gly^{A21}-HI, N^{εB29}-Z1-Ala^{A21}-HI, N^{εB29}-Z2-Ala^{A21}-HI, N^{εB29}-Z4-Ala^{A21}-HI, N^{εB29}-Z3-Ala^{A21}-HI, N^{εB29}-Z1-Gly^{A21}Gln^{B3}-HI, N^{εB29}-Z2-Gly^{A21}Gln^{B3}-HI, N^{εB29}-Z4-Gly^{A21}Gln^{B3}-HI, N^{εB29}-Z3-Gly^{A21}Gln^{B3}-HI, N^{εB29}-Z1-Ala^{A21}Gln^{B3}-HI, N^{εB29}-Z2-Ala^{A21}Gln^{B3}-HI, N^{εB29}-Z4-Ala^{A21}Gln^{B3}-HI, N^{εB29}-Z3-Ala^{A21}Gln^{B3}-HI, N^{εB29}-Z1-Gln^{B3}-HI, N^{εB29}-Z2-Gln^{B3}-HI, N^{εB29}-Z4-Gln^{B3}-HI, N^{εB29}-Z3-Gln^{B3}-HI, N^{εB29}-Z1-Glu^{B30}-HI, N^{εB29}-Z2-Glu^{B30}-HI, N^{εB29}-Z4-Glu^{B30}-HI, N^{εB29}-Z3-Glu^{B30}-HI, N^{εB29}-Z1-Gly^{A21}Glu^{B30}-HI, N^{εB29}-Z2-Gly^{A21}Glu^{B30}-HI, N^{εB29}-Z4-Gly^{A21}Glu^{B30}-HI, N^{εB29}-Z3-Gly^{A21}Glu^{B30}-HI, N^{εB29}-Z1-Gly^{A21}Gln^{B3}Glu^{B30}-HI, N^{εB29}-Z2-Gly^{A21}Gln^{B3}Glu^{B30}-HI, N^{εB29}-Z4-Gly^{A21}Gln^{B3}Glu^{B30}-HI, N^{εB29}-Z3-Gly^{A21}Gln^{B3}Glu^{B30}-HI, N^{εB29}-Z1-Ala^{A21}Glu^{B30}-HI, N^{εB29}-Z2-Ala^{A21}Glu^{B30}-HI, N^{εB29}-Z4-Ala^{A21}Gln^{B30}-HI, N^{εB29}-Z3-Ala^{A21}Glu^{B30}-HI, N^{εB29}-Z1-Ala^{A21}Gln^{B3}Glu^{B30}-HI, N^{εB29}-Z2-Ala^{A21}Gln^{B3}Glu^{B30}-HI, N^{εB29}-Z4-Ala^{A21}Gln^{B3}Glu^{B30}-HI, N^{εB29}-Z3-Ala^{A21}Gln^{B3}Glu^{B30}-HI, N^{εB29}-Z1-Gln^{B3}Glu^{B30}-HI, N^{εB29}-Z2-Gln^{B3}Glu^{B30}-HI, N^{εB29}-Z4-Gln^{B3}Glu^{B30}-HI, N^{εB29}-Z3-Gln^{B3}Glu^{B30}-HI and where Z1 is tridecanoyl, Z2 is tetradecanoyl, Z3 is dodecanoyl, Z4 is decanoyl, and HI is human insulin.

[0121] In some embodiments, insulin includes one or more of the following mutations and/or chemical modifications: N^{εB28}-XXXXX-Lys^{B28}Pro^{B29}-HI, N^{αB1}-XXXXX-Lys^{B28}Pro^{B29}-HI, N^{αA1}-XXXXX-Lys^{B28}Pro^{B29}-HI, N^{εB28}-XXXXX-N^{αB1}-XXXXX-Lys^{B28}Pro^{B29}-HI, N^{εB28}-XXXXX-N^{αA1}-XXXXX-Lys^{B28}Pro^{B29}-HI, N^{αA1}-XXXXX-N^{αB1}-XXXXX-Lys^{B28}Pro^{B29}-HI, N^{εB28}-XXXXX-N^{αA1}-XXXXX-N^{αB1}-XXXXX-Lys^{B28}Pro^{B29}-HI, N^{εB29}-XXXXX-HI, N^{αB1}-XXXXX-HI, N^{αA1}-XXXXX-HI, N^{εB29}-XXXXX-N^{αB1}-XXXXX-HI, N^{εB29}-XXXXX-N^{αA1}-XXXXX-HI, N^{αA1}-XXXXX-N^{αB1}-XXXXX-HI, N^{εB29}-XXXXX-N^{αA1}-XXXXX-N^{αB1}-XXXXX-HI, N^{εB29}-YYYYY-HI, N^{αB1}-YYYYY-HI, N^{αA1}-YYYYY-HI, N^{εB29}-YYYYY-N^{αB1}-YYYYY-HI, N^{εB29}-YYYYY-N^{αA1}-YYYYY-HI, N^{αA1}-YYYYY-N^{αB1}-YYYYY-HI, N^{εB29}-YYYYY-N^{αA1}-YYYYY-N^{αB1}-YYYYY-HI, N^{εB28}-YYYYY-Lys^{B28}Pro^{B29}-HI, N^{εB21}-YYYYY-Lys^{B28}Pro^{B29}-HI, N^{αA1}-YYYYY-Lys^{B28}Pro^{B29}-HI, N^{εB28}-YYYYY-N^{αB1}-YYYYY-Lys^{B28}Pro^{B29}-HI, N^{εB28}-YYYYY-N_{αA1}-YYYYY-Lys^{B28}Pro^{B29}-HI, N^{αB1}-YYYYY-N^{αB1}-YYYYY-Lys^{B28}Pro^{B29}-HI, N^{εB28}-YYYYY-N^{αA1}-YYYYY-N^{αB1}-YYYYY-Lys^{B28}Pro^{B29}-HI, and where YYYYY is one of acetyl or formyl and where XXXXX is one of: propionyl, butyryl, pentanoyl, hexanoyl, heptanoyl, octanoyl, nonanoyl or decanoyl and HI is human insulin.

[0122] In some embodiments, insulin may be conjugated through a reactive moiety that is naturally present within the insulin structure or is added prior to conjugation, including, for example, carboxyl or reactive ester, amine, hydroxyl, aldehyde, sulfhydryl, maleimidyl, alkynyl, azido, etc. moieties. Insulin naturally includes reactive alpha-terminal amine and epsilon-amine lysine groups to which NHS-ester, isocyanates or isothiocyanates can be covalently conjugated. In some embodiments, a modified insulin may be employed in which a suitable amino acid (e.g., a lysine or a non-natural amino acid) has been added or substituted into the amino acid sequence in order to provide an alternative point of conjugation in addition to the modified amino acids of the embodiments described herein. In some embodiments, the conjugation process may be controlled by selectively blocking certain reactive moieties prior to conjugation. In some embodiments, insulin may include any combination of modifications and the present disclosure also encompasses modified forms of non-human insulins (e.g., porcine insulin, bovine insulin, rabbit insulin, sheep insulin, etc.) that comprise any one of the aforementioned modifications. It is understood that some embodiments include these and other previously described modified insulins such as those described in U.S. Pat. Nos. 5,474,978; 5,461,031; 4,421,685; 7,387,996; 6,869,930; 6,174,856; 6,011,007; 5,866,538; 5,750,497; 6,906,028; 6,551,992; 6,465,426; 6,444,641; 6,335,316; 6,268,335; 6,051,551; 6,034,054; 5,952,297; 5,922,675; 5,747,642; 5,693,609; 5,650,486; 5,547,929; 5,504,188; US 2015/0353619, including non-natural amino acids described or referenced herein and including such modifications to the non-human insulins described herein. It is also to be understood that in some embodiments the insulin may be covalently conjugated to polyethylene glycol polymers, such as polyethylene glycol polymers of no more than Mn 60,000, or covalently conjugated either through permanent or reversible bonds to albumin.

[0123] In some embodiments, a compound, such as a molecular conjugate, is conjugated to a chelator, and in some embodiments the chelator can be used to capture a radioactive payload, such as gallium 68, copper 64, lutetium 177, or actinium 225. In some embodiments, the chelator is based on DOTA, NOTA, TETA, or 4-arm DOTA, and in some embodiments, the chelator can be linked to the peptide using a PEG linker through amide bonds to the chelator and to the peptide.

[0124] In some embodiments, the activity, bioavailability, solubility, isoelectric point, charge and/or hydrophobicity of the modified insulins can be controlled through chemical modifications and/or as result of interaction of a small molecule such as a sugar with the compounds, such as a molecular conjugates, described herein which are either covalently linked or mixed with insulin.

[0125] In some embodiments one or more elements, functional groups, or atoms may be specifically omitted or excluded from a depicted structure (e.g., a terminal functional group may be replaced by a hydrogen atom, or a linking group may be replaced by a bond), for example in Formulae FF1-FF224, and it will be understood that such omitted or excluded elements make these groups (structures) distinct and non-equivalent. For example, if an alternative version (variation) of a formula structure does not have a nitro group in R1 for B1 or B2, that variation is not equivalent (e.g., is structurally and chemically inequivalent) to a structure that includes the nitro group, at least because the nitro group changes the pKa of B1 and B2 in physiological conditions and hence the overall affinity of Z1c for glucose.

### Rotational Constrained Tethered Boron Conjugates.

[0126] In some embodiments, aromatic boron-containing compounds and/or aromatic boron-containing groups are rotationally constrained tether boron conjugates. In some embodiments, rotationally constrained tether boron conjugates presented in this disclosure contain scaffolds that are rotationally hindered by disfavored steric interactions (e.g. gauche vs anti interactions of substituents), hindered rotation due to bond hybridization (e.g., cis- vs trans-amide rotations), or through rigid covalent bonds (e.g., (E) vs (Z) configurations for alkene moieties). For example, formulae FF50-FF62, FF116, and FF121-134 contain alkyl functionalities geminal (e.g., attached to the same atom) to the amine groups that are covalently conjugated to the boronic acid functionalized moieties. Alkyl functionalities may limit the accessible dihedral angles and the rotation freedom around the C—C or C—X bond (commonly referred to as χ (chi) dihedral angles in amino acids). For example the hydroxyl sidechain on a serine residue can access dihedral angles of 60°, 180°, or 240° (−60°) with near equal distribution while the hydroxyl sidechain of threonine may only adopt dihedral angles of 180° or 240° (−60°). The presence of a methyl group geminal to the hydroxy on threonine may provide steric bulk, creating unfavorable interactions when other bulky substituents are in a gauche conformation relative to the methyl. Formulae FF50-FF62, FF116, and FF121-134 contain geminal alkyl substituents which may limit the accessible dihedral angles that the boron conjugated amines adopt, influencing adopted dihedral angles and placing the boronic functionalized groups closer together and allowing for increased binding of the conjugates to target molecules such as proteins or sugars.

[0127] In some embodiments, the stereochemistry of isomeric structures (e.g., the stereochemistry of a compound, such as a molecular conjugate, for example within the Z1c moiety) may selectively increase the affinity of the conjugate (e.g., the Z1c moiety) for a specific target diol, such as glucose. For example, in some embodiments one or more stereoisomers (e.g., cis- or trans-, (R) or (S), and (E) or (Z)) of Z1c may be selected to increase or decreases the affinity of Z1c (and the molecular architecture or conjugate as a whole) for glucose. In some embodiments, the cis form of Formulae FF1-FF224 is used when applicable (e.g., Z1c includes a structure having cis stereochemistry). In some embodiments, the trans form of Formulae FF1-FF224 is used when applicable, e.g., when Formulae FF1-FF224 includes two stereocenters linked by a bond, (e.g., Z1c includes a structure having trans stereochemistry). In some embodiments, the R form of Formulae FF1-FF224 is used when applicable, e.g., when Formulae FF1-FF224 includes at least one stereocenter, (e.g., Z1c includes a structure having R stereochemistry). In some embodiments, the S form of Formulae FF1-FF224 is used when applicable, e.g., when Formulae FF1-FF224 includes at least one stereocenter, (e.g., Z1c includes a structure having S stereochemistry). In some embodiments, the S,S form of Formulae FF1-FF224 is used when applicable, e.g., when Formulae FF1-FF224 includes two stereocenters linked by a bond, (e.g., Z1c includes a structure having S,S stereochemistry). In some embodiments, the S,R form of Formulae FF1-FF224 is used when applicable, e.g., when Formulae FF1-FF224 includes two stereocenters linked by a bond, (e.g., Z1c includes a structure having S,R stereochemistry). In some embodiments, the R,R form of Formulae FF1-FF224 is used when applicable, e.g., when Formulae FF1-FF224 includes two stereocenters linked by a bond, (e.g., Z1c includes a structure having R,R stereochemistry). In some embodiments, the R,S form of Formulae FF1-FF224 is used when applicable, e.g., when Formulae FF1-FF224 includes two stereocenters linked by a bond, (e.g., Z1c includes a structure having R,S stereochemistry). In some embodiments, a compound, such as a molecular conjugate, includes one or more tautomers of a compound, such as a molecular conjugate, disclosed herein. In some embodiments, a compound, such as a molecular conjugate, includes one or more stereoisomer or a mixture of stereoisomers of a compound, such as a molecular conjugate, disclosed herein.

[0128] In some embodiments, a compound, such as a molecular conjugate, is covalently conjugated to glucagon, GLP-1, GLP-2 or a variation of any of these (e.g., any variation with deletions, insertions and/or replacements of one or more amino acids). In some embodiments any suitable chemical modifications made to insulin discussed herein can be made to glucagon. In some embodiments the conjugate is mixed with a second or drug substance or one or more compounds chosen from: aminoethylglucose, aminoethylbimannose, aminoethyltrimannose, D-glucose, D-galactose, D-Allose, D-Mannose, D-Gulose, D-Idose, D-Talose, N-Azidomannosamine (ManNAz) or N-Azidogalactoseamine (GalNAz) or N-azidoglucoseamine (GlcNAz), 2′-fluororibose, 2′-deoxyribose, glucose, sucrose, maltose, mannose, derivatives of these (e.g., glucosamine, mannosamine, methylglucose, methylmannose, ethylglucose, ethylmannose, etc.), sorbitol, inositol, galactitol, dulcitol, xylitol, arabitol and/or higher order combinations of these (such as linear and/or branched bimannose, linear and/or branched trimannose), molecules containing cis-diols, catechols, tris, and DOPA molecules such as L-DOPA or L-3,4-dihydroxyphenylalanine.

[0129] Moreover, one skilled in the art will recognize that in some embodiments, one or more of suitable proteinogenic artificial amino acids can be used (included) in Z1a. For example, in some embodiments one or more of the following artificial amino acids can be used based on the methods described in and referenced through, and the list of amino acids provided in: Liu, C. C.; Schultz, P. G. (2010). “Adding new chemistries to the genetic code.” Annual Review of Biochemistry 79: 413-44. One skilled in the art will recognize that, in some embodiments, artificial amino acids can be incorporated by peptide synthesis in Z1a which is then covalently conjugated to the drug or insulin, and these include the amino acids referenced herein as well as previously reported non-proteinogenic amino acids. In some embodiments, artificial amino acids exist (e.g., may be included) in the insulin, and in some embodiments thereof, proteinogenic artificial amino acids can be incorporated through recombinant protein expression using suitable methods and approaches, including those described in United States patent and patent applications including: US 2008/0044854, U.S. Pat. Nos. 8,518,666, 8,980,581, US 2008/0044854, US 20140045261, US 2004/0053390, U.S. Pat. Nos. 7,229,634, 8,236,344, US 2005/0196427, US 2010/0247433, U.S. Pat. Nos. 7,198,915, 7,723,070, US 2002/0042097, US 2004/0058415, US 2008/0026422, US 2008/0160609, US 2010/0184193, US 2012/0077228, US 2014/025599, U.S. Pat. Nos. 7,198,915, 7,632,492, 7,723,070, and other proteinogenic artificial amino acids may be introduced recombinantly using methods and approaches described in: U.S. Pat. Nos. 7,736,872, 7,816,320, 7,829,310, 7,829,659, 7,883,866, 8,097,702, 8,946,148.

[0130] In some embodiments cyclic amino acids such as 3-hydroxyproline, 4-hydroxyproline, aziridine-2-earboxylic acid, azetidine-2-carboxylic acid, piperidine-2-carboxylic acid, 3-carboxy-morpholine, 3-carboxy-thiamorpholine, 4-oxaproline, pyroglutamic acid, 1,3-oxazolidine-4-carboxylic acid, 1,3-thiazolidine-4-carboxylic acid, 3-thiaproline, 4-thiaproline, 3-selenoproline, 4-selenoproline, 4-ketoproline, 3,4-dehydroproline, 4-aminoproline, 4-fluoroproline, 4,4-difluoroproline, 4-chloroproline, 4,4-dichloroproline, 4-bromoproline, 4,4-dibromoproline, 4-methylproline, 4-ethylproline, 4-cyclohexyl-proline, 3-phenylproline, 4-phenylproline, 3,4-phenylproline, 4-azidoproline, 4-carboxyproline, a-methylproline, a-ethylproline, a-propylproline, a-allylproline, a-benzylproline, a-(4-fluorobenzyl)-proline, a-(2-chlorobenzyl)-proline, a-(3-chlorobenzyl)-proline, a-(2-bromobenzyl)-proline, a-(4-bromobenzyl)-proline, a-(4-methylbenzyl)-proline, a-(diphenylmethyl)-proline, a-(naphthylmethyl)-proline, D-proline, or S-homoproline, (2S,4S)-4-fluoro-L-proline, (2S,4R)-4-fluoro-L-proline, (2S)-3,4-dehydro-L-proline, (2S,4S)-4-hydroxy-L-proline, (2S,4R)-4-hydroxy-L-proline, (2S,4S)-4-azido-L-proline, (2S)-4,4-difluoro-L-proline, (2S)-azetidine-2-carboxylic acid, (2S)-piperidine-2-carboxylic acid, or (4R)-1,3-thiazolidine-4-carboxylic acid can be used in the molecular architecture that is conjugated to insulin.

[0131] It is to be understood that in some embodiments, a specific orientation of amino acids is achieved using, for example, methods of Albericio, F. (2000). Solid-Phase Synthesis: A Practical Guide (1 ed.). Boca Raton: CRC Press. p. 848. In some embodiments a compound, such as a molecular conjugate, can bind to a diol, a catechol, a hexose sugar, glucose, xylose, fucose, galactosamine, glucosamine, mannosamine, galactose, mannose, fructose, galacturonic acid, glucuronic acid, iduronic acid, mannuronic acid, acetyl galactosamine, acetyl glucosamine, acetyl mannosamine, acetyl muramic acid, 2-keto-3-deoxy-glycero-galacto-nononic acid, acetyl neuraminic acid, glycolyl neuraminic acid, a neurotransmitter, dopamine, or a disaccharide or polymer of saccharides or diols.

[0132] In some embodiments modifications or intermediates may include the use of an N-methyliminodiacetic acid (MIDA) group to make a MIDA conjugated boronate or a MIDA boronate; such modifications can be used during preparation of boronates towards the final structures of use (e.g., in embodiments of methods for preparing the conjugates described herein). In some embodiments boronic acid pinacol esters are used towards the final structures wherein the pinacol group can be readily removed using standard techniques by one skilled in the art. The MIDA-protected boronate esters are easily handled, stable under air, compatible with chromatography, and unreactive under standard anhydrous cross-coupling conditions and easily deprotected at room temperature under mild aqueous basic conditions such as 1M NaOH, or even NaHCO₃, or as described by Lee, S. J. et al. (2008). J. Am. Chem. Soc. 130:466.

[0133] The biological mechanism by which wild type insulin binds to the insulin receptor is previously reported in Menting, J. G. et al. (2013). Nature 493, 241-245; and Menting, J. G. et al. (2014). “Protective hinge in insulin opens to enable its receptor engagement.” Proc. Natl. Acad. Sci. U.S.A. 111, E3395-3404. The activity of such insulin can be measured using any suitable technique, for example, by using in vitro insulin receptor binding with TyrA14-¹²⁵I human insulin as tracer and utilizing antibody binding beads with an insulin receptor monoclonal antibody. In some embodiments, animal models can be used for in vivo assessment of insulin activity during glucose challenge using methods that are known to one skilled in the art. In some embodiments, a compound, such as a molecular conjugate, is partially or fully expressed along with a recombinant protein of interest such as insulin. The processes for expression of insulin in E. coli are known and can be easily performed by one skilled in the art e.g., by using the procedures outlined in Jonasson (1996). Eur. J. Biochem. 236:656-661; Cowley (1997). FEBS Lett. 402:124-130; Cho (2001). Biotechnol. Bioprocess Eng. 6: 144-149; Tikhonov (2001). Protein Exp. Pur. 21: 176-182; Malik (2007). Protein Exp. Pur. 55: 100-111; and Min (2011). J. Biotech. 151:350-356. In the most common process, the protein is expressed as a single-chain proinsulin construct with a fission protein or affinity tag. The compound, such as a molecular conjugate, that includes Z1a when Z1a is present can be expressed as part of proinsulin, then modified chemically to conjugate, through amide linkages, to structures of interest. This approach provides good yield and reduces experimental complexity by decreasing the number of processing steps and allows refolding in a native-like insulin, see for example, Jonasson, Eur. J. Biochem. 236:656-661 (1996); Cho, Biotechnol Bioprocess Eng. 6: 144-149 (2001); Tikhonov, Protein Exp. Pur. 21:176-182 (2001); Min, J. Biotech. 151:350-356 (2011)). When expressed in E. coli, proinsulin is usually found in inclusion bodies and can be easily purified by one skilled in the art.

[0134] In some embodiments, a compound, such as a molecular conjugate, may be formulated for injection. For example, it may be formulated for injection into a subject, such as a human. In some embodiments, the composition may be a pharmaceutical composition, such as a sterile, injectable pharmaceutical composition. In some embodiments, the composition may be formulated for subcutaneous injection. In some embodiments, the composition is formulated for transdermal, intradermal, transmucosal, nasal, inhalable or intramuscular administration. In some embodiments, the composition may be formulated in an oral dosage form or a pulmonary dosage form. Pharmaceutical compositions suitable for injection may include sterile aqueous solutions containing, for example, sugars, polyalcohols such as mannitol and sorbitol, phenol, meta-cresol, and sodium chloride and dispersions may be prepared in glycerol, liquid polyethylene glycols, and mixtures thereof and in oils and the carrier can, for example, be a solvent or dispersion medium containing, for example, water, saccharides, ethanol, polyol (for example, glycerol, propylene glycol, and liquid polyethylene glycol, and the like), and suitable mixtures thereof. One skilled in the art recognizes that specific formulations can be developed to best suit the application and method of use of the molecular architectures of the invention. General considerations in the formulation and manufacture of pharmaceutical compositions, routes of administrating and including suitable pharmaceutically acceptable carriers may be found, for example, in Remington's Pharmaceutical Sciences, 19th ed., Mack Publishing Co., Easton, Pa., 1995. In some embodiments, the pharmaceutical composition may include zinc, e.g., Zn²⁺ along with insulin if the compound, such as a molecular conjugate, comprises insulin. Such zinc formulations are, for example, described in U.S. Pat. No. 9,034,818. For example, the pharmaceutical composition may comprise zinc at a molar ratio to the modified insulin of about M:N where M is 1-11 and N is 6-1. In some embodiments, such modified insulins may be stored in a pump, and that pump being either external or internal to the body releases the modified insulins. In some embodiments, a pump may be used to release a constant amount of modified insulin wherein the insulin is glucose responsive and can automatically adjust activity based on the levels of glucose in the blood and/or the release rate from the injection site. In some embodiments, the compositions may be formulated in dosage unit form for ease of administration and uniformity of dosage. In some embodiments, the pharmaceutical composition may further include a second insulin type to provide fast-acting or basal-insulin in addition to the effect afforded by the molecular architecture. In some embodiments, a compound, such as a molecular conjugate, is injected separately from insulin but modulates the activity of insulin by binding to insulin, and in some embodiments this activity change is dependent on glucose.

[0135] In some embodiments, the pharmaceutical composition comprises one or more of the compounds disclosed herein and at least one additional component selected from pharmaceutically acceptable carriers, pharmaceutically acceptable vehicles, and pharmaceutically acceptable excipients. In some embodiments, the pharmaceutical composition comprises a compound of Formula I and at least one additional component selected from pharmaceutically acceptable carriers, pharmaceutically acceptable vehicles, and pharmaceutically acceptable excipients.

[0136] In some embodiments the present disclosure includes compounds that can be part of a kit, wherein the kit includes a compound, such as a molecular conjugate, such as a compound comprising modified insulin, as well as a pharmaceutically acceptable carrier, and for injections may include a syringe or pen. In some embodiments, a kit may include a syringe or pen that is pre-filled with a pharmaceutical composition that includes the compound, such as a molecular conjugate, with a liquid carrier. Alternatively, a kit may include a separate container such as a vial with a pharmaceutical composition that includes the compound, such as a molecular conjugate, with a dry carrier and an empty syringe or pen. In some embodiments, such a kit may include a separate container that has a liquid carrier, which can be used to reconstitute a given composition that can then be taken up into the syringe or pen. In some embodiments, a kit may include instructions. In some embodiments, the kit may include blood glucose measuring devices that either locally or remotely calculate an appropriate dose of the modified insulin that is to be injected at a given point in time, or at regular intervals. Such a dosing regimen is unique to the patient and may, for example, be provided as instruction to program a pump either by a person or by a computer. The kit may include an electronic device which transfers blood glucose measurements to a second computer, either locally or elsewhere (for example, in the cloud) which then calculate the correct amount of compound, such as a molecular conjugate, comprising, e.g., a modified insulin that needs to be used by the patient at a certain time.

[0137] In some embodiments, the invention relates to a method for treating a disease or condition in a subject, comprising administering to the subject a composition including a compound, such as a molecular conjugate, described herein. In some embodiments, the disease or condition may be hyperglycemia, type 2 diabetes, impaired glucose tolerance, type 1 diabetes, obesity, metabolic syndrome X, or dyslipidemia, diabetes during pregnancy, pre-diabetes, Alzheimer's disease, MODY 1, MODY 2 or MODY 3 diabetes, mood disorders and psychiatric disorders. It will be appreciated that this combination approach may also be used with insulin resistant patients who are receiving an insulin sensitizer or a secondary drug for diabetes (such as, for example, a biguanide such as metformin, a glitazone) or/and an insulin secretagogue (such as, for example, a sulfonylurea, GLP-1, exendin-4 etc.) or amylin.

[0138] In some embodiments, a compound, such as a molecular conjugate, of the present disclosure may be administered to a patient who is receiving at least one additional therapy or taking at least one additional drug or therapeutic protein. In some embodiments, the at least one additional therapy is intended to treat the same disease or disorder as the administered compound, such as a molecular conjugate. In some embodiments, the at least one additional therapy is intended to treat a side-effect of the compound, such as a molecular conjugate, or as an adjuvant. The timeframe of the two therapies may differ or be the same; they may be administered on the same or different schedules as long as there is a period when the patient is receiving a benefit from both therapies. The two or more therapies may be administered within the same or different formulations as long as there is a period when the patient is receiving a benefit from both therapies. Any of these approaches may be used to administer more than one anti-diabetic drug to a subject.

[0139] In some embodiments a therapeutically effective amount of the compound, such as a molecular conjugate, which is sufficient amount to treat (meaning for example to ameliorate the symptoms of, delay progression of, prevent recurrence of, or delay onset of) the disease or condition at a reasonable benefit to risk ratio will be used. In some embodiments, this may involve balancing of the efficacy and additional safety to toxicity. By additional safety, it is meant that, for example, the compound, such as a molecular conjugate, can be responsive to changes in blood glucose levels or level of other molecules, even when the patient is not actively monitoring the levels of that molecule, such as blood glucose levels at a given timeframe, for example during sleep. In some embodiments, therapeutic efficacy and toxicity may be determined by standard pharmacological procedures in cell cultures or in vivo with experimental animals, and for example measuring ED₅₀ and LD₅₀ for therapeutic index of the drug. In some embodiments, the average daily dose of insulin with the molecular architecture is in the range of 5 to 400 U, (for example 30-150 U where 1 Unit of insulin is about 0.04 mg). In some embodiments, an amount of compound, such as a molecular conjugate, with these insulin doses is administered on a daily basis or bi-daily basis or by every three days or by every 4 days. In some embodiments the basis is determined by an algorithm, which can be computed by a computer. In some embodiments, an amount of compound, such as a molecular conjugate, with 5 to 10 times these doses is administered on a weekly basis or at regular intervals. In some embodiments, an amount of conjugate with 10 to 20 times these doses is administered on a bi-weekly basis or at regular intervals. In some embodiments, an amount of compound, such as a molecular conjugate, with 20 to 40 times these doses is administered on a monthly basis or at regular intervals. In some embodiments, the C-terminus of the A-chain of insulin may be further extended with a peptide (amino acid sequence) including 1-20 amino acid residues. In some embodiments the insulin analogue is a desB30 insulin.

[0140] In some embodiments, Z1a is an amino acid or a peptide. In at least some embodiments, the Z1a includes (is composed of) 1-50 amino acid residues, for example, 1 residue, 50 residues, or any intermediate number of residues (such as e.g., 10, 15, 25, 30, 42 residues, etc.). In some embodiments, the Z1a includes 1-15 amino acids. In at least some embodiments, the peptide Z1a includes 1-8 amino acids. In some embodiments, Z1a includes 5 to 6 amino acids. In some embodiments, Z1a comprises at least one amino acid independently selected from the: Alanine (A), Asparagine (N), Glutamine (Q), Threonine (T), Methionine (M), Histidine (H), Cysteine (C), Valine (V), Isoleucine (I), Lysine (K), and Leucine (L), and the rest of the amino acids each independent selected from any of the twenty naturally occurring amino acids. In some embodiments, Z1a may include diaminopropionic acid, diaminobutyric acid, or ornithine. In some embodiments, Z1a includes 1 to 5 lysines (K). In some embodiments, Z1a includes 1 to 3 K amino acids. In some embodiments Z1a includes 5 to 6 amino acids and at least one or more amino acids are K. In some embodiments, Z1a includes 5 to 6 amino acids and 1 to 3 amino acids are K. In some embodiments, Z1a is selected from any of KA, KD, KE, KF, KG, KH, KI, KL, KN, KP, KQ, KR, KS, KT, KY, KAA, KAD, KAE, KAF, KAG, KAH, KAI, KAL, KAN, KAQ, KAR, KAS, KAT, KAY, KDA, KDD, KDE, KDF, KDG, KDH, KDI, KDL, KDN, KDQ, KDR, KDS, KDT, KDY, KEA, KED, KEE, KEF, KEG, KEH, KEI, KEL, KEN, KEQ, KER, KES, KET, KEY, KFA, KFD, KFE, KFF, KFG, KFH, KFI, KFL, KFN, KFQ, KFR, KFS, KFT, KFY, KGA, KGD, KGE, KGF, KGG, KGH, KGI, KGL, KGN, KGQ, KGR, KGS, KGT, KGY, KHA, KHD, KHE, KHF, KHG, KHH, KHI, KHL, KHN, KHQ, KHR, KHS, KHT, KHY, KIA, KID, KIE, KIF, KIG, KIH, KII, KIL, KIN, KIQ, KIR, KIS, KIT, KIY, KLA, KLD, KLE, KLF, KLG, KLH, KLI, KLL, KLN, KLQ, KLR, KLS, KLT, KLY, KNA, KND, KNE, KNF, KNG, KNH, KNI, KNL, KNN, KNQ, KNR, KNS, KNT, KNY, KPA, KPD, KPE, KPF, KPG, KPH, KPI, KPL, KPN, KPQ, KPR, KPS, KPT, KPY, KQA, KQD, KQE, KQF, KQG, KQH, KQI, KQL, KQN, KQQ, KQR, KQS, KQT, KQY, KRA, KRD, KRE, KRF, KRG, KRH, KRI, KRL, KRN, KRQ, KRR, KRS, KRT, KRY, KSA, KSD, KSE, KSF, KSG, KSH, KSI, KSL, KSN, KSQ, KSR, KSS, KST, KSY, KTA, KTD, KTE, KTF, KTG, KTH, KTI, KTL, KTN, KTQ, KTR, KTS, KTT, KTY, KYA, KYD, KYE, KYF, KYG, KYH, KYI, KYL, KYN, KYQ, KYR, KYS, KYT, KYY, SEQ ID NOs 75-24014, 24037-24046. In some embodiments, Z1a is selected from KSNAPQK (SEQ ID NO:24037), KNASPQK (SEQ ID NO:24038), KLWAVK (SEQ ID NO:24039), KGARLK (SEQ ID NO:24040), ADKKTLN (SEQ ID NO:24041), KGSHK (SEQ ID NO:4238), KNSTK (SEQ ID NO:5085), GKNSTK (SEQ ID NO:13989), GKGSHK (SEQ ID NO:13198), GSHKGSHK (SEQ ID NO:24042), GKPSHKP (SEQ ID NO:24043), GKGPSK (SEQ ID NO:24044), GKGSKK (SEQ ID NO:24045), and GKKPGKK (SEQ ID NO:24046).

[0141] In some embodiments Z1a is appended to the N-terminus and/or C-terminus, and/or inserted into the sequence of the A-chain or B-chain of insulin.

### Compounds

[0142] In some embodiments, the present disclosure provides a compound comprising X1 and one or more Z1c, or a tautomer, stereoisomer or a mixture of stereoisomers, or a pharmaceutically acceptable salt, or hydrate, or isotopic derivative thereof, wherein: X1 comprises:
[0143] (i) NH₂ or OH (for example, X1 is NH₂ or OH);
[0144] (ii) a drug substance comprising an amine;
[0145] (iii) a drug substance that is covalently conjugated to an amine containing linker; or
[0146] (iv) an amine configured to be covalently conjugated to a drug substance;
[0147] wherein each Z1c is independently selected from Formulae FF1-FF224; and wherein each Z1c is covalently conjugated, directly or indirectly, to an amine in X1 or to OH when X1 is OH.

[0148] In some embodiments, Z1c is independently selected from Formulae FF1-FF48, Formulae FF49-FF88, FF89-FF112, FF113-FF136, FF137-FF160, FF161-FF164, FF165-FF166, FF167-FF192, FF193-FF209, and FF210-FF224.

[0149] Formulae FF1-FF48 are:

[chemical structure]

[chemical structure]

[chemical structure]

[chemical structure]

[chemical structure]

[chemical structure]

[0150] wherein X represents a point of covalent attachment either directly to an amine in X1 or to an amine that is covalently conjugated directly or indirectly to X1, or to OH when X1 is OH;
[0151] i is 1, 2, 3, 4, 5, 6, or 7;
[0152] j is 1, 2, 3, 4, 5, 6, or 7; and B₁ and B₂, which may be identical or different, each independently represents an aromatic boron-containing group.

[0153] Formulae FF49-FF88 are:

[chemical structure]

[chemical structure]

[chemical structure]

[chemical structure]

[chemical structure]

[chemical structure]

[0154] wherein X represents a point of covalent attachment either directly to an amine in X1 or to an amine that is covalently conjugated directly or indirectly to X1, or to OH when X1 is OH;
[0155] i is 1, 2, 3, 4, 5, 6, or 7;
[0156] j is 1, 2, 3, 4, 5, 6, or 7; R1a is selected from COOH, CH₃, H, and OH; R2, R3, R4 and R5 are each independently selected from CH₃, H, OH, and COOH, and at least one of R2, R3, R4 and R5 is CH₃ or OH; and B₁ and B₂, which may be identical or different, are each independently an aromatic boron-containing group.

[0157] Formulae FF89-FF112 are:

[chemical structure]

[chemical structure]

[chemical structure]

[chemical structure]

[chemical structure]

[0158] wherein X represents a point of covalent attachment either directly to an amine in X1 or to an amine that is covalently conjugated directly or indirectly to X1, or to OH when X1 is OH;
[0159] i is 1, 2, 3,4, 5, 6, or 7; and
[0160] B₁, B₂ and B₃, which may be identical or different, are each independently an aromatic boron-containing group, a carboxylic acid derivative, or a H, wherein in each FF89-FF112 structure containing B1, B2 and B3 groups, at least two of the B1, B2 and B3 groups are independently an aromatic boron-containing group.

[0161] Formulae FF113-FF136 are:

[chemical structure]

[chemical structure]

[chemical structure]

[chemical structure]

[0162] wherein X represents a point of covalent attachment either directly to an amine in X1 or to an amine that is covalently conjugated directly or indirectly to X1, or to OH when X1 is OH;
[0163] i is 0, 1, 2, 3, 4, 5, 6, or 7;
[0164] j is 0, 1, 2, 3, 4, 5, 6, or 7;
[0165] k is 0, 1, 2, 3, 4, 5, 6, or 7;
[0166] m is 0, 1, 2, 3, 4, 5, 6, or 7;
[0167] wherein i+j+k+m is greater than 0;
[0168] each R1 is independently selected from H, an alkyl group, an acyl group, a cycloalkyl group, a haloalkyl group, an aryl group, and a heteroaryl group, each R1 optionally comprises one or more alkyl-halide, halide, sulfhydryl, aldehyde, amine, acid, hydroxyl, alkyl or aryl groups; and
[0169] B₁ and B₂, which may be identical or different, each independently represents an aromatic boron-containing group.

[0170] Formulae FF137-FF160 are:

[chemical structure]

[chemical structure]

[chemical structure]

[chemical structure]

[0171] wherein X represents a point of covalent attachment either directly to an amine in X1 or to an amine that is covalently conjugated directly or indirectly to X1, or to OH when X1 is OH;
[0172] i is 0, 1, 2, 3, 4, 5, 6, or 7;
[0173] j is 0, 1, 2, 3, 4, 5, 6, or 7;
[0174] k is 0, 1, 2, 3, 4, 5, 6, or 7;
[0175] m is 0, 1, 2, 3, 4, 5, 6, or 7;
[0176] wherein i+j+k+m is greater than 0;
[0177] each R1 is independently selected from H, an alkyl group, an acyl group, a cycloalkyl group, a haloalkyl group, an aryl group, and a heteroaryl group, each R1 optionally comprises one or more alkyl-halide, halide, sulfhydryl, aldehyde, amine, acid, hydroxyl, alkyl or aryl groups; and
[0178] B₁ and B₂, which may be identical or different, each independently represents an aromatic boron-containing group. In one embodiment, B1 and B₂ may be identical or different.

[0179] Formulae FF161-FF164 are:

[chemical structure]

[0180] wherein X represents a point of covalent attachment either directly to an amine in X1 or to an amine that is covalently conjugated directly or indirectly to X1, or to OH when X1 is OH;
[0181] i is 1, 2, 3, 4, or 5 (e.g., 1, 2, 3, or 5);
[0182] j is 1, 2, 3, 4, or 5 (e.g., 1, 2, 3, or 5);
[0183] each R6, R7, R8, and R9 for different values of j is independently selected from H, CF₃, CH₃, CHF₂, and (CH₂)ₘCH₃, wherein m is 1, 2, 3, 4, or 5;
[0184] Y3, Y4, Y5, Y6 and Y7 are each independently selected from H, CH₂—X4, and Formulae IV-1 to IV-135;
[0185] wherein X4 is selected from —COOH, —(CH₂)ₘCOOH, an alkyl group, an acyl group, a cycloalkyl group, a haloalkyl group, an aryl group, and a heteroaryl group, each X4 optionally comprises one or more alkyl-halide, halide, sulfhydryl, aldehyde, amine, acid, hydroxyl, alkyl or aryl groups; wherein m is 1, 2, 3, 4, or 5;
[0186] wherein at least one of Y5, Y6 and Y7 in Formulae FF162 and FF163 is not H and at least one of Y7, R8 and R9 in FF164 is not H; and
[0187] wherein Formulae IV-1 to IV-135 are:

[chemical structure]

[chemical structure]

[chemical structure]

[chemical structure]

[chemical structure]

[chemical structure]

[chemical structure]

[chemical structure]

[chemical structure]

[chemical structure]

[chemical structure]

[chemical structure]

[chemical structure]

[chemical structure]

[chemical structure]

[0188] wherein Xa represents CH═O, CHF₂, CF₃, CH₂SH, COOH, CH₂OH, CH₂NO₂, CH₂NH₂, CH₃, C(CH₃)₃, CH(CH₃)₂, CH((CH₂)₃CH₃)₂, or CH(CH₂CH₃)₂;
[0189] Xb represents O, NH, CH₂, or S;
[0190] Xc represents CH or N;
[0191] each R₁₀ is independently selected from H, F, Cl, Br, CH₃, CF₃, CH═O, OH, COOH, and (CH₂)ₙCH₃,
[0192] m is 1, 2, 3, 4, or 5; and n is 1, 2, 3, 4, or 5;
[0193] B₁ and B₂, which may be identical or different, each independently represents an aromatic boron-containing group; and
[0194] * in Formulae IV-1 to IV-135 represents the point of attachment to corresponding Formulae FF161-164.

[0195] In some embodiments, when j is 4, X is not NH₂ for FF163.

[0196] Formulae FF165-FF166 are:

[chemical structure]

[0197] wherein X represents a point of covalent attachment either directly to an amine in X1 or to an amine that is covalently conjugated directly or indirectly to X1, or to OH when X1 is OH;
[0198] m is 1, 2, 3, 4, 5, 6, or 7;
[0199] n is 1, 2, 3, 4, 5, 6, or 7;
[0200] X5 is S, O, or NH; and
[0201] each R₁ is independently selected from H, F, Cl, Br, OH, CH₂—NH₂, NH₂, (C═O)—NH₂, CH═O, SO₂CH₃, SO₂CF₃, CF₃, CHF₂, NO₂, CH₃, OCH₃, O(CH₂)ₘCH₃, —(SO₂)NH CH₃, —(SO₂)NH(CH₂)ₘCH₃, and OCF₃, wherein m is 1, 2, 3, 4, 5, 6, or 7.

[0202] Formulae FF167-FF192 are:

[chemical structure]

[chemical structure]

[chemical structure]

[0203] wherein X represents a point of covalent attachment either directly to an amine in X1 or to an amine that is covalently conjugated directly or indirectly to X1, or to OH when X1 is OH; and
[0204] B₁ and B₂, which may be identical or different, each independently represents an aromatic boron-containing group.

[0205] Formulae FF193-FF209 are:

[chemical structure]

[chemical structure]

[chemical structure]

[0206] wherein R in FF208 and FF209 is an alkyl, aryl or halide that is covalently conjugated through at least one CH₂ group to the amino group in the side chain of FF208 or FF209,
[0207] R1 and R2 are independently selected from H, CH3, alkyl, and formulae IV-1 to IV-135;
[0208] i is 1, 2, 3,4, or 5;
[0209] j is 1, 2, 3, 4, or 5; and
[0210] wherein X represents a point of covalent attachment either directly to an amine in X1 or to an amine that is covalently conjugated directly or indirectly to X1, or to OH when X1 is OH; and
[0211] B₁ and B₂, which may be identical or different, each independently represents an aromatic boron-containing group.

[0212] Formulae FF210-FF224 are:

[chemical structure]

[chemical structure]

[0213] wherein R11 in FF210 to FF212 is selected from Formulae IV-1 to IV-135 and R12 is selected from an amine, a hydroxyl, an alkyl, and a halide group;
[0214] wherein each R13 is independently selected from H, CH₃, alkyl, aryl and Formulae IV-1 to IV-135; R14 is selected from H, CH₃, alkyl, aryl and heteroaryl;
[0215] wherein X represents a point of covalent attachment either directly to an amine in X1 or to an amine that is covalently conjugated directly or indirectly to X1, or to OH when X1 is OH;
[0216] X″ represents a point of covalent attachment to an amine —N in the compound, wherein — represents a single covalent bond to a CH₂ or CH group in the compound;
[0217] i is 1, 2, 3, 4, or 5;
[0218] j is 1, 2, 3, 4, or 5; and
[0219] B₁, B₂, B₃, B₄, B₅, and B₆ each independently represents an aromatic boron-containing group, wherein in each FF structure containing B₁, B₂ and B₃ groups, at least two of the B1, B2 and B3 groups are independently an aromatic boron-containing group; and
[0220] wherein at least one primary or secondary amine in FF1-FF223 is optionally covalently conjugated to B6.

[0221] In some embodiments, the present disclosure provides a compound of Formula (I) or a molecular conjugate represented by Formula I, or a stereoisomer or a mixture of stereoisomers, or pharmaceutically acceptable salt thereof:

[chemical structure]

[0222] wherein X1 comprises:
   [0223] (i) NH₂ or OH (for example, X1 is NH₂ or OH),
   [0224] (ii) a polypeptide drug substance comprising an amine,
   [0225] (iii) a polypeptide drug substance that is covalently conjugated to an amine containing linker, or
   [0226] (iv) an amine configured to be covalently conjugated to a polypeptide drug substance;
[0227] each Z1c is independently selected from Formulae FF1-FF224 and covalently conjugated either directly, or via Z1a and/or Z1b, to X1; each Z1a independently comprises 1 to 50 amino acids connected together using amide or peptide bonds; each Z1b is independently a small-molecule linker; each m′ is independently 0 or 1; each n′ is independently 0 or a positive integer; each o′ is independently an integer of 1 or greater; each p′ is a positive integer; and q′ is a positive integer of at least 1 and not more than two times the total number of amine groups in X1, wherein when any of n′, o′, p′, or q′ is 2 or more, the corresponding groups Z1a, Z1b, and Z1c are independently selected and may be the same or different; wherein each Z1c is independently covalently conjugated, directly or indirectly, to an amine of Z1a, to an amine of Z1b, or to X1; and wherein optionally the molecular conjugate may comprise one or more isotopes at any position of the molecular conjugate of Formula I.

[0228] In at least some embodiments, X1 comprises one of:
[0229] (i) NH₂ or OH (for example, X1 is NH₂ or OH),
[0230] (ii) a polypeptide drug substance comprising an amine,
[0231] (iii) a polypeptide drug substance that is covalently conjugated to an amine containing linker, or
[0232] (iv) an amine configured to be covalently conjugated to a polypeptide drug substance.

[0233] In at least some embodiments, the compound is a molecular conjugate represented by Formula I, or a stereoisomer or a mixture of stereoisomers, or pharmaceutically acceptable salts:

[chemical structure]

[0234] wherein:
[0235] X1 is NH₂ or OH; or
[0236] X1 comprises:
   [0237] i. a polypeptide drug substance comprising an amine;
   [0238] ii. a polypeptide drug substance that is covalently conjugated to an amine containing linker; or
   [0239] iii. an amine configured to be covalently conjugated to a polypeptide drug substance;
[0240] each Z1c is independently selected from Formulae FF1-FF224 and covalently conjugated either directly, or via Z1a and/or Z1b, to X1;
[0241] each Z1a independently comprises 1 to 50 amino acids connected together using amide or peptide bonds; each Z1b is independently a small-molecule linker;
[0242] each m′ is independently 0 or 1;
[0243] each n′ is independently 0 or a positive integer;
[0244] each o′ is independently an integer greater than or equal to 1;
[0245] each p′ is a positive integer; and
[0246] q′ is a positive integer of at least 1 and not more than two times the total number of amine groups in X1, wherein when any of n′, o′, p′, or q′ is 2 or more, the corresponding groups Z1a, Z1b, and Z1c are independently selected and may be the same or different; wherein each Z1c is independently covalently conjugated, directly or indirectly, to an amine of Z1a, to an amine of Z1b, or to X1; and wherein optionally the molecular conjugate may comprise one or more isotopes at any position of the molecular conjugate of Formula I. In some embodiments, the compound is additionally covalently conjugated as described by Formula I, and/or wherein one or more amines are each independently acetylated and/or independently alkylated.

[0247] In some embodiments, the compound of Formula I is covalently conjugated to B₁ using a covalent linkage X—B₁, wherein X is an amino group in Formula I.

[0248] In some embodiments, X1 comprises a polypeptide drug substance and the covalent conjugation to X1 is to amino group(s) in one or more lysine residues and/or to the N-terminal amino groups in X1.

[0249] In some embodiments, the compound comprises at least one of B₁, B₂ and B₃ independently selected from Formulae F1-F12 or wherein the compound comprises at least one of B₄, B₅ and B₆ independently selected from Formulae F1-F10,
[0250] wherein Formulae F1-F10 are:

[chemical structure]

[chemical structure]

[0251] wherein for B₁, B₂, and B₃:
[0252] one R₁ represents (C=O)—*, S(═O)(═O)—*, (CH₂)ₘ(C═O)—*, or (CH₂)ₘ—*, wherein —* represents an attachment point to the rest of Z1c, and m is 1, 2, 3, 4, 5, 6, or 7; and
[0253] each remaining R₁ is independently selected from H, F, Cl, Br, OH, CH₂—NH₂, NH₂, (C═O)—NH₂, CH=O, SO₂CH₃, SO₂CF₃, CF₃, CHF₂, NO₂, CH₃, OCH₃, O(CH₂)ₘCH₃, —(SO₂)NH CH₃, —(SO₂)NH(CH₂)ₘCH₃, and OCF₃, wherein m is 1, 2, 3, 4, 5, 6, or 7;
[0254] wherein for B₄ and B₅:
[0255] one R1 for B₄ represents (CH₂)ₘ—Ø, wherein —Ø represents an attachment point to the rest of Z1c and one R₁ for B₅ represents (C═O)—*, S(═O)(═O)—*, (CH₂)ₘ(C═O)—*, or (CH₂)ₘ—*, wherein —* represents an attachment point to the rest of Z1c, and m is 1, 2, 3, 4, 5, 6, or 7; and
[0256] each remaining R₁ is independently selected from H, F, Cl, Br, OH, CH₂—NH₂, NH₂, (C═O)—NH₂, CH═O, SO₂CH₃, SO₂CF₃, CF₃, CHF₂, NO₂, CH₃, OCH₃, O(CH₂)ₘCH₃, —(SO₂)NH CH₃, —(SO₂)NH(CH₂)ₘCH₃, and OCF₃, wherein m is 1, 2, 3,4, 5, 6, or 7;
[0257] wherein for B₆:
[0258] one R₁ for B₆ represents (CH₂)ₘ—Ø, wherein —Ø represents an attachment point to the rest of the compound, and m is 1, 2, 3, 4, 5, 6, or 7; and
[0259] each remaining R₁ is independently selected from H, F, Cl, Br, OH, CH₂—NH₂, NH₂, (C═O)—NH₂, CH═O, SO₂CH₃, SO₂CF₃, CF₃, CHF₂, NO₂, CH₃, OCH₃, O(CH₂)ₘCH₃, —(SO₂)NH CH₃, —(SO₂)NH(CH₂)ₘCH₃, and OCF₃, wherein m is 1, 2, 3, 4, 5, 6, or 7;
[0260] wherein,
[0261] for Formulae F3-F4:
   [0262] R_{w} is O or S;
[0263] for Formulae F5-F10:
[0264] Y8 is selected from O, N, and NR, wherein R is an alkyl group or H;
[0265] Y9 is H, CH₃, or an alkyl group, provided that when Y8 is O, Y9 is a CH₃ or an alkyl group;
[0266] each Y10 is independently selected from H, CH₃, F, CF₃, and OCH₃; and
[0267] i is 1, 2, or 3; and
   [0268] wherein Formulae F11-F12 are:

[chemical structure]

[0269] j is 1, 2, 3, 4, 5, 6, or 7; and
   [0270] — represents an attachment point to the rest of Z1c.

[0271] In at least some embodiments, B₁, B₂ and B₃ may be identical or different. If B₁, B₂ and B₃ are all present in a compound of the present disclosure, then each is independently an aromatic boron-containing group, a carboxylic acid derivative, or a H, wherein in each FF structure (i.e., FF1 to FF224) containing B₁, B₂ and B₃ groups, at least two of the B1, B2 and B3 are independently an aromatic boron-containing group.

[0272] In some embodiments, the compound comprises at least one Z1b selected from Formulae IIa-IIai or Formulae IIIa-IIIai,
[0273] wherein Formulae IIa-IIai are:

[chemical structure]

[chemical structure]

[chemical structure]

[0274] wherein:
[0275] r is 0, 1, 2,3, 4, or 5;
[0276] s is 0, 1, 2, 3, 4, or 5;
[0277] W represents CH₂—˜ or (C═O)—˜, wherein —˜ is a covalent linkage to X1; and
[0278] each V₁ is independently selected from NH—†, CH₂—†, and (C═O)—† and each V₂ is N—†, wherein —† is a covalent linkage towards successive Z1b, Z1a or Z1c, provided that V₁ is NH—† when connected to Z1c; and the covalent linkages between Z1a and Z1b units each independently comprise an amine linkage or an amide linkage; and when n′=0 and m′=1, Z1a is directly conjugated to X1 by an amine linkage or amide linkage, and
[0279] wherein Formulae IIIa-IIIai are:

[chemical structure]

[chemical structure]

[chemical structure]

[0280] wherein:
[0281] r is 1, 2, 3, 4, or 5;
[0282] s is 1, 2, 3, 4, or 5; and
[0283] each V₁ is independently selected from NH—†, CH₂—†, and (C═O)—† and each V₂ is N—†, wherein —† is a covalent linkage towards successive Z1b, Z1a or Z1c, provided that V₁ is NH—† when connected to Z1c; and the covalent linkages between Z1a and Z1b units each independently comprise an amine linkage or an amide linkage; and when n′=0 and m′=1, Z1a is directly conjugated to X1 by an amine linkage or amide linkage.

[0284] In some embodiments, at least one Z1c is covalently conjugated indirectly via a linker (indirect linker) to the compound (e.g., the compound of Formula I). In some embodiments, the linker is selected from (i) Formulae FL1-FL19:

[chemical structure]

[0285] wherein, in Formulae FL1 to FL19:
[0286] Z″ represents an attachment point toward X1;
[0287] R″ represents an attachment point toward Z1c;
[0288] p is 1, 2, 3, 4, or 5,
[0289] q is 1, 2,3, 4, or 5,
[0290] r is 1, 2, 3, 4, or 5; and
[0291] any primary amine is optionally acetylated or alkylated; and
[0292] (ii) an L- or D-amino acid comprising at least one amine group directly conjugated to Z1c, wherein an acid functional group of the amino acid is conjugated toward X1 in Formula I.

[0293] In some embodiments, n′ is 1 and each of the Z1b is independently selected from (i) Formulae FL1-FL19:

[chemical structure]

[chemical structure]

[0294] wherein, in Formulae FL1 to FL19:
[0295] Z″ represents an attachment point toward X1;
[0296] R″ represents an attachment point toward Z1c;
[0297] p is 1, 2, 3, 4, or 5,
[0298] q is 1, 2, 3, 4, or 5,
[0299] r is 1, 2, 3, 4, or 5; and
[0300] any primary amine is optionally acetylated or alkylated; and
[0301] (ii) an L- or D-amino acid comprising at least one amine group directly conjugated to Z1c, wherein an acid functional group of the amino acid is conjugated toward X1 in Formula I.

[0302] In some embodiments, the compound of Formula (I) is selected from:

[chemical structure]

[0303] In some embodiments, the compound of Formula I is selected from:

[chemical structure]

In some embodiments, the compound of Formula I is selected from:

[chemical structure]

[0304] In some embodiments, the compound is

[chemical structure]

when p′=1, m′=0, o′=1, n′=0, and q′=1.

[0305] In some embodiments, the compound is

[chemical structure]

when p′=1 and 2, m′=0 and 1, o′=1 and 1, n′=0, and q′=2 and 1.

[0306] In some embodiments, in Formula I, Z1c is directly connected to X1 through an optional covalent-spacer, and the optional covalent-spacer is independently selected from gamma-glutamic acid, beta-alanine, and

[chemical structure]

[0307] Formula FL3, wherein p is 1 or 2; and

[chemical structure]

[0308] Formula FL5, wherein p is 2, 3, or 4;

[0309] In some embodiments, X1 is OH or NH₂, and X1 further comprises a drug substance covalently conjugated directly or indirectly to the compound.

[0310] In at least some embodiments, the compound of the present disclosure comprises a drug substance comprising a polypeptide hormone, a human polypeptide hormone and/or insulin, or an analogue thereof, or a hybrid polypeptide comprising one or more combinations thereof.

[0311] In at least some embodiments, the compound of the present disclosure comprises an amine in the compound that is conjugated via an amide linkage to an aromatic boron-containing compound (e.g., group). In some embodiments, the aromatic boron-containing group is selected from a phenylboronic acid, boroxole, and phenylboronate.

[0312] In at least some embodiments, the compound of the present disclosure is dehydrated (loses) by 1, 2, 3, 4, 5, 6, 7, 8, or more water molecules.

[0313] In at least some embodiments, the compound of the present disclosure is formulated in a solution comprising one or more of a buffer, stabilizer, vasodilator, preservative, surfactant, salt, sugar, or compounds containing one or more hydroxyls, alcohols, diols, or phenols. For example, the solution could comprise one or more of citrate, zinc, and/or cresol.

[0314] In at least some embodiments, X1 comprises a human polypeptide hormone of the human pancreas, insulin, glucagon, GLP-1, a somatostatin, a gastric inhibitory polypeptide, a glucose-dependent insulinotropic polypeptide, a hybrid peptide comprising sequences from two or more human polypeptide hormones, or an analogue thereof.

[0315] In some embodiments, X1 comprises human insulin or a human insulin analogue comprising an A-chain and a B-chain, wherein the A-chain comprises a sequence selected from SEQ ID NOs 1 and 3 to 33, and the B-chain comprises a sequence selected from SEQ ID NOs 2 and 34 to 74, 24047, and 24048;
[0316] each Z1c is independently selected from FF1, FF10, FF12, FF14, FF15, FF114, FF115, FF116, FF163, FF193, FF194, FF203, and FF221-FF224 and covalently conjugated either directly, or indirectly via the linker, to Z1a and/or Z1b, or to X1;
[0317] each Z1a is independently absent or independently comprises a sequence selected from K, GK, KGSH (SEQ ID NO:24049), KGSHK (SEQ ID NO:4238), KNSTK (SEQ ID NO:5085), GKASHK (SEQ ID NO:12414), GKEEEK (SEQ ID NO:12677), GKEEHK (SEQ ID NO:12680), GKGHSK (SEQ ID NO:13120), GKGSH (SEQ ID NO:24050), GKGSHK (SEQ ID NO:13198), GKGSTK (SEQ ID NO:13205), GKHENK (SEQ ID NO:13271), GKNSHK (SEQ ID NO:13982), GKNSTK (SEQ ID NO:13989), GKQSSK (SEQ ID NO:14380), GKYQFK (SEQ ID NO:15128), GKGSKK (SEQ ID NO:24045), GKKPGKK (SEQ ID NO:24046), GKGPSK (SEQ ID NO:24044), GKPSHKP (SEQ ID NO:24043), and GSHKGSHK (SEQ ID NO:24042);
[0318] each linker is selected from FL1, FL3, FL4, and FL5;
[0319] each m′ is independently 0 or 1;
[0320] each n′ is independently 0, 1, 2, or 3;
[0321] each o′ is independently 1, 2, 3, 4, or 5;
[0322] each p′ is 1, 2, 3, 4, or 5; and
[0323] q′ is 1, 2, 3, or 4, wherein when any of n′, o′, p′, or q′ is 2 or more, the corresponding groups Z1a, Z1b, and Z1c are independently selected and may be the same or different; and
[0324] wherein each Z1c is independently covalently conjugated, directly or indirectly, to an amine of Z1a, to an amine of Z1b, or to X1.

[0325] In some embodiments, X1 comprises the human insulin or human insulin analogue comprising an A-chain and a B-chain, wherein the A-chain comprises SEQ ID NO:1; and the B-chain is selected from SEQ ID NOs 2, 36, 24047, and 24048;
[0326] each Z1c is independently selected from FF1, FF10, FF12, FF14, FF15, FF114, FF115, FF116, FF193, FF194, FF203, and FF221-FF224 and covalently conjugated either directly, or indirectly via the linker, to Z1a and/or Z1b, or to X1;
[0327] each Z1a independently comprises a sequence selected from K, GK, KGSH (SEQ ID NO:24049), KGSHK (SEQ ID NO:4238), KNSTK (SEQ ID NO:5085), GKASHK (SEQ ID NO:12414), GKEEEK (SEQ ID NO:12677), GKEEHK (SEQ ID NO:12680), GKGHSK (SEQ ID NO:13120), GKGSH (SEQ ID NO:24050), GKGSHK (SEQ ID NO:13198), GKGSTK (SEQ ID NO:13205), GKHENK (SEQ ID NO:13271), GKNSHK (SEQ ID NO:13982), GKNSTK (SEQ ID NO:13989), GKQSSK (SEQ ID NO:14380), GKYQFK (SEQ ID NO:15128), GKGSKK (SEQ ID NO:24045), GKKPGKK (SEQ ID NO:24046), GKGPSK (SEQ ID NO:24044), GKPSHKP (SEQ ID NO:24043), and GSHKGSHK (SEQ ID NO:24042);
[0328] each linker is independently absent or independently selected from FL3 and FL5;
[0329] each m′ is independently 0 or 1;
[0330] each n′ is independently 0 or 2;
[0331] each o′ is independently 1, 2, or 3;
[0332] each p′ is 1, 2, or 3; and
[0333] q′ is 1, 2, or 3, wherein when any of n′, o′, p′, or q′ is 2 or more, the corresponding groups Z1a, Z1b, and Z1c are independently selected and may be the same or different;
[0334] wherein each Z1c is independently covalently conjugated, directly or indirectly, to an amine of Z1a, to an amine of Z1b, or to X1.

[0335] In some embodiments, each of the Z1a is independently absent or independently comprises a sequence selected from K, GK, KGSH (SEQ ID NO:24049), GKGSH (SEQ ID NO:24050), KGSHK (SEQ ID NO:4238), and GKGSHK (SEQ ID NO:13198).

[0336] In some embodiments, each of the Z1c is independently selected from FF1, FF10, FF12, FF14, FF15, FF114, FF115, FF116, and FF221-FF224. In some embodiments, B₁ and B₂ are independently selected from Formulae F1 and F2. In some embodiments, the B₁ and the B₂ are F2. In some embodiments, at least one R1 in B₁ or B₂ is F or CF₃. In some embodiments, Z1b is independently absent, FL3, or FL5. In some embodiments, each of the Z1c is independently selected from FF10, FF12, FF116, FF221, FF222, and FF224. In some embodiments, each B₁ and B₂ is F2 and is covalently conjugated to Z1c using an amide linkage,
[0337] each Z1b is independently absent; FL3 wherein p is 1, 2, or 3; or FL5 wherein p is 2, 3, or 4;
[0338] each FF is independently selected from FF10, FF12, FF116, FF134, FF163, FF193, FF203, FF221, FF222 and FF224; wherein FF12 and FF222 has either (S,R) or (S,S) stereochemistry;
[0339] each Z1c is conjugated either directly or indirectly through FL3 or FL5 to the amine group in one or more lysine side chain in X1 or the N-terminus in X1; and
[0340] X1 is a polypeptide drug substance and/or an insulin optionally having from 0 to 4 residues replaced, inserted, or mutated to lysines, and wherein the lysines are each conjugated directly or indirectly to a Z1c.

[0341] In some embodiments, Z1c is FF224, n′ is 0, and Z1a is an amine containing amino acid.

[0342] In some embodiments, the compound is selected from

[chemical structure]

[0343] In some embodiments, Z1c is covalently conjugated directly to X1 via a linker, and wherein the linker is independently selected from gamma-glutamic acid, beta-alanine, and

[chemical structure]

[0344] Formula FL3,
[0345] wherein p is 1, 2, or 3; and

[chemical structure]

[0346] Formula FL5,
[0347] wherein p is 2, 3, or 4.

[0348] In some embodiments, the compound further comprises a drug substance covalently conjugated directly or indirectly to the compound.

[0349] In some embodiments, the compound of Formula I is selected from Examples 315, 318, 320, 605-608, 610-612, 589-595, 562-574, and 803-876.

[0350] In some embodiments, X1 is a polypeptide drug substance and/or an insulin optionally having from 0 to 4 residues replaced, inserted, or mutated to lysines, and wherein the lysines are each conjugated to a Z1c.

[0351] In some embodiments, one or more amines are each independently acetylated and/or independently alkylated.

[0352] In some embodiments, X1 comprises a polypeptide drug substance and the covalent conjugation to X1 is to amino group(s) in one or more lysine residues and/or to the N-terminal amino groups in X1.

[0353] In some embodiments, each R1 in FF1-FF224 is independently selected from a C₁-C₂₂ alkyl group, a C₁-C₂₂ acyl group, a (C₃-C₈)cycloalkyl group, a C₁-C₂₂ haloalkyl group, an aryl group, and a heteroaryl group, each R1 optionally comprises one or more C₁-C₂₂ alkyl-halide, halide, sulfhydryl, aldehyde, amine, acid, hydroxyl, C₁-C₂₂ alkyl, or aryl groups.

[0354] In some embodiments, X4 is selected from —COOH, —(CH₂)ₘCOOH, a C₁-C₂₂ alkyl group, a C₁-C₂₂acyl group, a (C₃-C₈)cycloalkyl group, a C₁-C₂₂ haloalkyl group, an aryl group, and a heteroaryl group, each X4 optionally comprises one or more C₁-C₂₂ alkyl-halide, halide, sulfhydryl, aldehyde, amine, acid, hydroxyl, C₁-C₂₂ alkyl, or aryl groups; wherein m is 1, 2, 3, 4, or 5.

[0355] In some embodiments, the alkyl group of Y9 is a C₁-C₂₂ alkyl. In some embodiments, Y9 is CH₃.

[0356] In some embodiments, at least one primary or secondary amine in FF1-FF223 is covalently conjugated to B6.

[0357] In some embodiments, an amine in the compound is conjugated via an amide linkage to an aromatic boron-containing group.

[0358] In some embodiments, the aromatic boron-containing group is selected from a phenylboronic acid, boroxole, and phenylboronate.

[0359] In some embodiments, the compound is formulated in a solution comprising one or more of a buffer, stabilizer, vasodilator, preservative, surfactant, salt, sugar, or compounds containing one or more hydroxyls, alcohols, diols, or phenols. In some embodiments, the solution comprises one or more of citrate, zinc, and/or cresol.

[0360] In some embodiments, Z1c is conjugated to a cysteine.

[0361] In some embodiments, the compound (e.g., the compound of Formula I) is covalently conjugated either directly or through a linker to a diol, sugar, carbohydrate or a diol containing molecule.

[0362] In some embodiments, the compound (e.g., the compound of Formula I) is covalently conjugated to an antibody, albumin or a fragment thereof, or covalently conjugated either directly or through a linker to a molecule that can bind to at least one protein present in human plasma. In at least one embodiment, the present disclosure provides a method to administer the compounds disclosed herein to a human subject as a therapeutic or prophylactic agent.

[0363] In some embodiments, the compounds disclosed herein are used as intermediate compounds for the manufacture of any compounds disclosed herein.

[0364] In some embodiments, the compounds disclosed herein comprise at least one Z1c. In at least some embodiments, the Z1c is a boron containing compound. In some embodiments, a subset of boron containing compounds is selected from a non-aromatic and/or an aromatic boron-containing group. In some embodiments, Z1c is an aromatic boron-containing group. In at least one embodiment, the compound of the present disclosure comprises at least one Z1c selected from:

[chemical structure]

[chemical structure]

[chemical structure]

[chemical structure]

[chemical structure]

[chemical structure]

[chemical structure]

[chemical structure]

[chemical structure]

[chemical structure]

[0365] In at least some embodiments, the Z1c is selected from FF1-FF224. In some embodiments, the compound comprises at least one Z1c having at least one chiral center and selected from FF1, FF2, FF5, FF9, FF11-FF13, FF15-FF24, FF27, FF31, FF34-FF36, FF38, FF39, FF43-FF58, FF60-FF70, FF72-FF75, FF77-FF80, FF82-FF84, FF86-FF212, FF216-FF220, FF222, FF223, and combinations thereof.

[0366] In some embodiments, the compound comprises at least one FF12 and/or FF116. In some embodiments, the stereochemistry of FF12 and FF116 is independently selected from (S,S); (S,R); (R,R); and (R,S).

[0367] In some embodiments, X1 comprises human insulin or a human insulin analogue comprising an A-chain and a B-chain, wherein the C-terminus of the A-chain of the human insulin analogue is optionally extended with a polypeptide of up to 20 residues, and/or the N-terminus of the B-chain of the human insulin analogue is optionally extended with a polypeptide of up to 10 residues. In some embodiments, one to six residues of the insulin A-chain and/or the insulin B-chain are deleted or mutated.

[0368] In some embodiments, X1 comprises at least one lysine having an amine side chain, and Z1c is covalently conjugated directly to the amine side chain. In some embodiments, the compound of the present disclosure comprises at least one Z1a comprising one or more amino acids having an amine side chain, and wherein the one or more amino acids are selected from lysine, diaminopropionic acid, diaminobutyric acid, and ornithine; and wherein Z1c is covalently conjugated, directly or indirectly, to the amine side chain.

[0369] In some embodiments, the compound of the present disclosure may include one or more isotopes selected from deuterium, tritium, carbon-13, carbon-14, and iodine-124. In at least one embodiment, the compound comprises deuterium.

[0370] In some embodiments, X1 comprises a drug substance covalently conjugated to at least one Z1c through an acid containing linker. In some embodiments, a composition of the present disclosure comprises at least one compound as disclosed herein (e.g., a compound comprising X1 and one or more Z1c, Formula I), or a tautomer, stereoisomer or a mixture of stereoisomers, or a pharmaceutically acceptable salt, or hydrate, or isotopic derivative thereof formulated together with one or more pharmaceutically acceptable carriers.

[0371] In some embodiments, the present disclosure also provides a composition or a mixture comprising at least one compound as disclosed herein, for use as a medicament for the treatment of diabetes, for control of blood sugar levels, or to control the release of a drug based on physiological levels of diol containing small molecules or sugars.

[0372] In some disclosed embodiments are a method of administering a compound as disclosed herein to a human subject as a therapeutic or prophylactic agent.

[0373] In some embodiments, the disclosure provides a method of making a compound as disclosed herein comprising at least one alkylation and/or amidation step.

[0374] In some embodiments, the disclosure provides a method of treating a subject by administering a device or formulation comprising a compound as disclosed herein, such as Examples 1-880. For example, the device can be a fixed dose injector, microdosing injector, an internal or external patch.

[0375] In some embodiments, the disclosure provides a method of treating or preventing diabetes, impaired glucose tolerance, hyperglycemia, or metabolic syndrome (metabolic syndrome X, insulin resistance syndrome) comprising administering to a subject in need thereof a therapeutically effective amount of a compound disclosed herein.

[0376] In at least some embodiments, the present disclosure is directed to a compound of Formulae FF1-FF224, or a tautomer, stereoisomer or a mixture of stereoisomers, or a pharmaceutically acceptable salt, or hydrate, or isotopic derivative thereof. In at least some embodiments, the present disclosure is directed to a compound selected from Formulae FF1-FF48, Formulae FF49-FF88, FF89-FF112, FF113-FF136, FF137-FF160, FF161-FF164, FF165-FF166, FF167-FF192, FF193-FF209, and FF210-FF224.

[0377] In some embodiments, the present disclosure is directed to a compound selected from Formulae FF1-FF48,
[0378] wherein X is selected from an amine, OH, and halogen; and
[0379] i is 1, 2, 3, 4, 5, 6, or 7;
[0380] j is 1, 2, 3, 4, 5, 6, or 7; and
[0381] B₁ and B₂, which may be identical or different, each independently represents an aromatic boron-containing group.

[0382] In some embodiments, the present disclosure is directed to a compound selected from Formulae FF49-FF88,
[0383] wherein X is selected from an amine, OH, and halogen;
[0384] i is 1, 2, 3, 4, 5, 6, or 7;
[0385] j is 1, 2, 3, 4, 5, 6, or 7;
[0386] R1a is selected from COOH, CH₃, H, and OH;
[0387] R2, R3, R4 and R5 is each independently selected from CH₃, H, OH, and COOH, and at least one of R2, R3, R4 and R5 is CH₃ or OH; and
[0388] B₁ and B₂, which may be identical or different, are each independently an aromatic boron-containing group.

[0389] In some embodiments, the present disclosure is directed to a compound selected from Formulae FF89-FF112,
[0390] wherein X is selected from an amine, OH, and halogen;
[0391] i is 1, 2, 3, 4, 5, 6, or 7; and
[0392] B₁, B₂ and B₃, which may be identical or different, each independently represents an aromatic boron-containing group, a carboxylic acid derivative, or a H, wherein at least two of B1, B2 and B3 in each FF structure are independently an aromatic boron-containing group.

[0393] In some embodiments, the present disclosure is directed to a compound selected from Formulae FF113-FF136,
[0394] wherein X is selected from an amine, OH, and halogen;
[0395] i is 0, 1, 2, 3, 4, 5, 6, or 7;
[0396] j is 0, 1, 2, 3, 4, 5, 6, or 7;
[0397] k is 0, 1, 2, 3, 4, 5, 6, or 7;
[0398] m is 0, 1, 2, 3, 4, 5, 6, or 7;
[0399] wherein i+j+k+m is greater than 0
[0400] each R1 is independently selected from H, an alkyl group, an acyl group, a cycloalkyl group, a haloalkyl group, an aryl group, and a heteroaryl group, each R1 optionally comprises one or more alkyl-halide, halide, sulfhydryl, aldehyde, amine, acid, hydroxyl, alkyl or aryl groups; and
[0401] B₁ and B₂, which may be identical or different, each independently represents an aromatic boron-containing group.

[0402] In some embodiments, the present disclosure is directed to a compound selected from Formulae FF137-FF160,
[0403] wherein X is selected from an amine, OH, and halogen;
[0404] i is 0, 1, 2, 3, 4, 5, 6, or 7;
[0405] j is 0, 1, 2, 3, 4, 5, 6, or 7;
[0406] k is 0, 1, 2, 3, 4, 5, 6, or 7;
[0407] m is 0, 1, 2, 3, 4, 5, 6, or 7;
[0408] wherein i+j+k+m is greater than 0;
[0409] each R1 is independently selected from H, an alkyl group, an acyl group, a cycloalkyl group, a haloalkyl group, an aryl group, and a heteroaryl group, each R1 optionally comprises one or more alkyl-halide, halide, sulfhydryl, aldehyde, amine, acid, hydroxyl, alkyl or aryl groups; and
[0410] B₁ and B₂, which may be identical or different, each independently represents an aromatic boron-containing group.

[0411] In some embodiments, the present disclosure is directed to a compound selected from Formulae FF161-FF164,
[0412] wherein X is selected from an amine, OH, and halogen;
[0413] i is 1, 2, 3, 4, or 5 (e.g., 1, 2, 3, or 5);
[0414] j is 1, 2, 3, 4, or 5 (e.g., 1, 2, 3, or 5);
[0415] each R6, R7, R8, and R9 for different values of j is independently selected from H, CF₃, CH₃, CHF₂, and (CH₂)ₘCH₃, wherein m is 1, 2, 3, 4, or 5;
[0416] Y3, Y4, Y5, Y6 and Y7 are each independently selected from H, CH₂—X4, and Formulae IV-1 to IV-135 (as previously defined);
[0417] wherein X4 is selected from —COOH, —(CH₂)ₘCOOH, an alkyl group, an acyl group, a cycloalkyl group, a haloalkyl group, an aryl group, and a heteroaryl group, each optionally comprising one or more alkyl-halide, halide, sulfhydryl, aldehyde, amine, acid, hydroxyl, alkyl or aryl groups; wherein m is 1, 2, 3, 4, or 5;
[0418] wherein at least one of Y5, Y6, and Y7 in Formulae FF162 and FF163 is not H; and
[0419] at least one of Y7, R8 and R9 in FF164 is not H; and
[0420] Xa represents CH═O, CHF₂, CF₃, CH₂SH, COOH, CH₂OH, CH₂NO₂, CH₂NH₂, CH₃, C(CH₃)₃, CH(CH₃)₂, CH((CH₂)₃CH₃)₂, or CH(CH₂CH₃)₂;
[0421] Xb represents O, NH, CH₂, or S;
[0422] Xc represents CH or N;
[0423] each R₁₀ is independently selected from H, F, Cl, Br, CH₃, CF₃, CH═O, OH, COOH, and (CH₂)·CH₃,
[0424] m is 1, 2, 3, 4, or 5; and n is 1, 2, 3, 4, or 5; and
[0425] B₁ and B₂, which may be identical or different, each independently represents an aromatic boron-containing group. In some embodiments, when j is 4, X is not NH₂ for FF163.

[0426] In some embodiments, the present disclosure is directed to a compound selected from Formulae FF165-FF166,
[0427] wherein X is selected from an amine, OH, and halogen;
[0428] m is 1, 2, 3, 4, 5, 6, or 7;
[0429] n is 1, 2, 3, 4, 5, 6, or 7;
[0430] X5 is S, O, or NH; and
[0431] each R₁ is independently selected from H, F, Cl, Br, OH, CH₂—NH₂, NH₂, (C═O)—NH₂, CH═O, SO₂CH₃, SO₂CF₃, CF₃, CHF₂, NO₂, CH₃, OCH₃, O(CH₂)ₘCH₃, —(SO₂)NH CH₃, —(SO₂)NH(CH₂)ₘCH₃, and OCF₃, wherein m is 1, 2, 3, 4, 5, 6, or 7.

[0432] In some embodiments, the present disclosure is directed to a compound selected from Formulae FF167-FF192,
[0433] wherein X is selected from an amine, OH, and halogen; and
[0434] B₁ and B₂, which may be identical or different, each independently represents an aromatic boron-containing group.

[0435] In some embodiments, the present disclosure is directed to a compound selected from Formulae FF193-FF209,
[0436] wherein R in FF208 and FF209 is an alkyl, aryl or halide that is covalently conjugated through at least one CH₂ group to the amino group in the side chain of FF208 or FF209;
[0437] R1 and R2 are independently selected from H, CH₃, alkyl, and formulae IV-1 to IV-135;
[0438] i is 1, 2, 3, 4, or 5;
[0439] j is 1, 2, 3, 4, or 5; and
[0440] wherein X is selected from an amine, OH, and halogen; and
[0441] B₁ and B₂, which may be identical or different, each independently represents an aromatic boron-containing group.

[0442] In some embodiments, the present disclosure is directed to a compound selected from Formulae FF210-FF224,
[0443] wherein R11 in FF210 to FF212 is independently selected from Formulae IV-1 to IV-135 and R12 is selected from an amine, a hydroxyl, an alkyl, and a halide group;
[0444] wherein each R13 is independently selected from H, CH₃, alkyl, aryl, and formulae IV-1 to IV-135; R14 is selected from H, CH₃, alkyl, aryl, and heteroaryl; wherein X is independently selected from an amine, OH, and halogen;
[0445] X″ is an amine;
[0446] i is 1, 2, 3, 4, or 5;
[0447] j is 1, 2, 3, 4, or 5; and
[0448] B₁, B₂, B₃, B₄, B₅, and B₆, each independently represents an aromatic boron-containing group, wherein in any compound containing B₁, B₂ and B₃ groups, at least two groups are independently an aromatic boron-containing group.

[0449] In at least some embodiments, when X is an amine in any one of Formulae FF1 to FF223, X is optionally acetylated or alkylated.

[0450] In some embodiments, the compound comprises at least one of B₁, B₂ and B₃ independently selected from Formulae F1-F12 or wherein the compound comprises at least one of B₄, B₅ and B₆ independently selected from Formulae F1-F10. In at least some embodiments, B1, B₂ and B₃ may be identical or different. If B1, B₂ and B₃ are all present in a compound of the present disclosure, then each is independently an aromatic boron-containing group, a carboxylic acid derivative, or a H, with the proviso that in each FF structure (i.e., FF1 to FF224) containing B1, B₂ and B₃ groups, at least two groups are independently an aromatic boron-containing group.

[0451] In some embodiments, for B1, B₂, B₃:
[0452] one R1 represents (C═O)—*, S(═O)(═O)—*, (CH₂)ₘ(C═O)—*, or (CH₂)ₘ—*, wherein —* represents an attachment point to the rest of Z1c, and m is 1, 2, 3, 4, 5, 6, or 7;
[0453] each remaining R₁ is independently selected from H, F, Cl, Br, OH, CH₂—NH₂, NH₂, (C═O)—NH₂, CH═O, SO₂CH₃, SO₂CF₃, CF₃, CHF₂, NO₂, CH₃, OCH₃, O(CH₂)ₘCH₃, —(SO₂)NH CH₃, —(SO₂)NH(CH₂)ₘCH₃, and OCF₃, wherein m is 1, 2, 3, 4, 5, 6, or 7;

[0454] In some embodiments, for B₄, B₅:
[0455] one R₁ for B₄ represents (CH₂)ₘ—Ø, wherein —Ø represents the attachment point (representing a covalent bond) to an amine in X1 and one R₁ for B₅ represents (C═O)—*, S(═O)(═O)—*, (CH₂)ₘ(C═O)—*, or (CH₂)ₘ—*, wherein —* represents the attachment point to the same amine in X1, and m is 1, 2, 3, 4, 5, 6, or 7;
[0456] each remaining R₁ is independently selected from H, F, Cl, Br, OH, CH₂—NH₂, NH₂, (C═O)—NH₂, CH═O, SO₂CH₃, SO₂CF₃, CF₃, CHF₂, NO₂, CH₃, OCH₃, O(CH₂)ₘCH₃, —(SO₂)NH CH₃, —(SO₂)NH(CH₂)ₘCH₃, and OCF₃, wherein m is 1, 2, 3, 4, 5, 6, or 7.

[0457] In some embodiments, for B₆:
[0458] one R1 for B₆ represents (CH₂)ₘ—Ø, wherein —Ø represents the attachment point (representing a covalent bond) to the rest of the compound, and m is 1, 2, 3, 4, 5, 6, or 7;
[0459] each remaining R₁ is independently selected from H, F, Cl, Br, OH, CH₂—NH₂, NH₂, (C═O)—NH₂, CH═O, SO₂CH₃, SO₂CF₃, CF₃, CHF₂, NO₂, CH₃, OCH₃, O(CH₂)ₘCH₃, —(SO₂)NH CH₃, —(SO₂)NH(CH₂)ₘCH₃, and OCF₃, wherein m is 1, 2, 3,4, 5, 6, or 7.

[0460] In some embodiments,

### for Formulae F3-F4:

[0461] R_{w} is O or S;
[0462] for Formulae F5-F10:
[0463] Y8 is selected from O, N, and NR, wherein R is an alkyl group or H;
[0464] Y9 is H, CH₃, or an alkyl group, provided that when Y8 is O, Y9 is a CH₃ or higher alkyl group;
[0465] each Y10 is independently selected from H, CH₃, F, CF₃, and OCH₃; and
[0466] i is 1, 2, or 3.

[0467] In some embodiments, the compound is selected from:
[0468] N-(3-(3-borono-5-nitrobenzamido)propyl)-N-(3-borono-5-nitrobenzoyl)glycine (DS01);
[0469] N-(4-((4-(3-borono-5-nitrobenzamido)cyclohexyl)methyl)cyclohexyl)-N-(3-borono-5-nitrobenzoyl)glycine (DS02);
[0470] N-(4-((3-borono-5-nitrobenzamido)methyl)benzyl)-N-(3-borono-5-nitrobenzoyl)glycine (DS03);
[0471] N-(3-((3-borono-5-nitrobenzamido)methyl)benzyl)-N-(3-borono-5-nitrobenzoyl)glycine (DS04);
[0472] N-(4-(3-borono-5-nitrobenzamido)butyl)-N-(3-borono-5-nitrobenzoyl)glycine (DS05);
[0473] N-(3-(3-borono-5-fluorobenzamido)propyl)-N-(3-borono-5-fluorobenzoyl)glycine (DS06);
[0474] N-(3-(3-borono-5-fluorobenzamido)-2,2-dimethylpropyl)-N-(3-borono-5-fluorobenzoyl)glycine (DS07);
[0475] bis(3-(3-borono-5-fluorobenzamido)propyl)glycine (DS08);
[0476] N-(4-((3-borono-5-fluorobenzamido)methyl)benzyl)-N-(3-borono-5-fluorobenzoyl)glycine (DS09);
[0477] N-(3-((3-borono-5-fluorobenzamido)methyl)benzyl)-N-(3-borono-5-fluorobenzoyl)glycine (DS10);
[0478] N-(2-(3-borono-5-fluorobenzamido)cyclohexyl)-N-(3-borono-5-fluorobenzoyl)glycine (DS11);
[0479] N-(3-(3-borono-4-fluorobenzamido)propyl)-N-(3-borono-4-fluorobenzoyl)glycine (DS12);
[0480] N-(4-((4-(3-borono-4-fluorobenzamido)cyclohexyl)methyl)cyclohexyl)-N-(3-borono-4-fluorobenzoyl)glycine (DS13);
[0481] N-(3-(3-borono-4-fluorobenzamido)-2,2-dimethylpropyl)-N-(3-borono-4-fluorobenzoyl)glycine (DS14);
[0482] N-(4-((3-borono-4-fluorobenzamido)methyl)benzyl)-N-(3-borono-4-fluorobenzoyl)glycine (DS15);
[0483] N-(3-((3-borono-4-fluorobenzamido)methyl)benzyl)-N-(3-borono-4-fluorobenzoyl)glycine (DS16);
[0484] N-((1S,2R)-2-(3-borono-4-fluorobenzamido)cyclohexyl)-N-(3-borono-4-fluorobenzoyl)glycine (DS17);
[0485] N-((1S,2S)-2-(3-borono-4-fluorobenzamido)cyclohexyl)-N-(3-borono-4-fluorobenzoyl)glycine (DS18);
[0486] N-(3-(3-borono-5-bromobenzamido)propyl)-N-(3-borono-5-bromobenzoyl)glycine (DS19);
[0487] N-(4-((4-(3-borono-5-bromobenzamido)cyclohexyl)methyl)cyclohexyl)-N-(3-borono-5-bromobenzoyl)glycine (DS20);
[0488] bis(3-(3-borono-5-bromobenzamido)propyl)glycine (DS21);
[0489] N-(4-((3-borono-5-bromobenzamido)methyl)benzyl)-N-(3-borono-5-bromobenzoyl)glycine (DS22);
[0490] N-(3-((3-borono-5-bromobenzamido)methyl)benzyl)-N-(3-borono-5-bromobenzoyl)glycine (DS23);
[0491] N-(2-(3-borono-5-bromobenzamido)cyclohexyl)-N-(3-borono-5-bromobenzoyl)glycine (DS24);
[0492] N-(3-(4-borono-3-fluorobenzamido)propyl)-N-(4-borono-3-fluorobenzoyl)glycine (DS25);
[0493] N-(4-((4-(4-borono-3-fluorobenzamido)cyclohexyl)methyl)cyclohexyl)-N-(4-borono-3-fluorobenzoyl)glycine (DS26);
[0494] N-(3-(4-borono-3-fluorobenzamido)-2,2-dimethylpropyl)-N-(4-borono-3-fluorobenzoyl)glycine (DS27);
[0495] bis(3-(4-borono-3-fluorobenzamido)propyl)glycine (DS28);
[0496] N-(4-((4-borono-3-fluorobenzamido)methyl)benzyl)-N-(4-borono-3-fluorobenzoyl)glycine (DS29);
[0497] N-(3-((4-borono-3-fluorobenzamido)methyl)benzyl)-N-(4-borono-3-fluorobenzoyl)glycine (DS30);
[0498] N-((1S,2R)-2-(4-borono-3-fluorobenzamido)cyclohexyl)-N-(4-borono-3-fluorobenzoyl)glycine (DS31);
[0499] N-(1-hydroxy-1,3-dihydrobenzo[c][1,2]oxaborole-6-carbonyl)-N-(3-(1-hydroxy-1,3-dihydrobenzo[c][1,2]oxaborole-6-carboxamido)propyl)glycine (DS32);
[0500] N-(1-hydroxy-1,3-dihydrobenzo[c][1,2]oxaborole-6-carbonyl)-N-(5-(1-hydroxy-1,3-dihydrobenzo[c][1,2]oxaborole-6-carboxamido)pentyl)glycine (DS33);
[0501] N-(1-hydroxy-1,3-dihydrobenzo[c][1,2]oxaborole-6-carbonyl)-N-(3-(1-hydroxy-1,3-dihydrobenzo[c][1,2]oxaborole-6-carboxamido)-2,2-dimethylpropyl)glycine (DS34);
[0502] bis(3-(1-hydroxy-1,3-dihydrobenzo[c][1,2]oxaborole-6-carboxamido)propyl)glycine (DS35);
[0503] N-(1-hydroxy-1,3-dihydrobenzo[c][1,2]oxaborole-6-carbonyl)-N-(3-((1-hydroxy-1,3-dihydrobenzo[c][1,2]oxaborole-6-carboxamido)methyl)benzyl)glycine (DS36);
[0504] N-(1-hydroxy-1,3-dihydrobenzo[c][1,2]oxaborole-6-carbonyl)-N-((1S,2R)-2-(1-hydroxy-1,3-dihydrobenzo[c][1,2]oxaborole-6-carboxamido)cyclohexyl)glycine (DS37);
[0505] N-(1-hydroxy-1,3-dihydrobenzo[c][1,2]oxaborole-6-carbonyl)-N-(4-(1-hydroxy-1,3-dihydrobenzo[c][1,2]oxaborole-6-carboxamido)butyl)glycine (DS38);
[0506] N-(1-hydroxy-1,3-dihydrobenzo[c][1,2]oxaborole-6-carbonyl)-N-((1S,2S)-2-(1-hydroxy-1,3-dihydrobenzo[c][1,2]oxaborole-6-carboxamido)cyclohexyl)glycine (DS39);
[0507] (R)—N-(1-hydroxy-1,3-dihydrobenzo[c][1,2]oxaborole-6-carbonyl)-N-(2-(1-hydroxy-1,3-dihydrobenzo[c][1,2]oxaborole-6-carboxamido)propyl)glycine (DS40);
[0508] (S)—N-(1-hydroxy-1,3-dihydrobenzo[c][1,2]oxaborole-6-carbonyl)-N-(2-(1-hydroxy-1,3-dihydrobenzo[c][1,2]oxaborole-6-carboxamido)propyl)glycine (DS41);
[0509] N-(1-hydroxy-1,3-dihydrobenzo[c][1,2]oxaborole-6-carbonyl)-N-(2-(1-hydroxy-1,3-dihydrobenzo[c][1,2]oxaborole-6-carboxamido)cyclohexyl)glycine (DS42);
[0510] N-(3-(4-borono-3,5-difluorobenzamido)propyl)-N-(4-borono-3,5-difluorobenzoyl)glycine (DS43);
[0511] N-(3-(4-borono-2-fluorobenzamido)propyl)-N-(4-borono-2-fluorobenzoyl)glycine (DS44);
[0512] N-(2-(N-ethyl-1-hydroxy-1,3-dihydrobenzo[c][1,2]oxaborole-6-carboxamido)ethyl)-N-(1-hydroxy-1,3-dihydrobenzo[c][1,2]oxaborole-6-carbonyl)glycine (DS45);
[0513] N-(1-hydroxy-1,3-dihydrobenzo[c][1,2]oxaborole-6-carbonyl)-N-(2-(1-hydroxy-N-(2-hydroxyethyl)-1,3-dihydrobenzo[c][1,2]oxaborole-6-carboxamido)ethyl)glycine (DS46);
[0514] N-(1-hydroxy-1,3-dihydrobenzo[c][1,2]oxaborole-6-carbonyl)-N-(5-(1-hydroxy-1,3-dihydrobenzo[c][1,2]oxaborole-6-carboxamido)hexyl)glycine (DS47);
[0515] N-(1-hydroxy-1,3-dihydrobenzo[c][1,2]oxaborole-6-carbonyl)-N-(4-((4-(1-hydroxy-1,3-dihydrobenzo[c][1,2]oxaborole-6-carboxamido)cyclohexyl)methyl)cyclohexyl)glycine (DS48);
[0516] ((2S,4S)-1-(1-hydroxy-1,3-dihydrobenzo[c][1,2]oxaborole-6-carbonyl)-4-(1-hydroxy-1,3-dihydrobenzo[c][1,2]oxaborole-6-carboxamido)pyrrolidine-2-carbonyl)glycine (DS49);
[0517] ((2S,4S)-4-(3-borono-4-fluorobenzamido)-1-(3-borono-4-fluorobenzoyl)pyrrolidine-2-carbonyl)glycine (DS50);
[0518] ((2S,4S)-4-(3-borono-5-nitrobenzamido)-1-(3-borono-5-nitrobenzoyl)pyrrolidine-2-carbonyl)glycine (DS51);
[0519] ((2S,4S)-4-(5-borono-2-fluorobenzamido)-1-(5-borono-2-fluorobenzoyl)pyrrolidine-2-carbonyl)glycine (DS52);
[0520] (S)-(1,4-bis(1-hydroxy-1,3-dihydrobenzo[c][1,2]oxaborole-6-carbonyl)piperazine-2-carbonyl)glycine (DS53);
[0521] (S)—N-(3-amino-2-(1-hydroxy-1,3-dihydrobenzo[c][1,2]oxaborole-6-carboxamido)-3-oxopropyl)-N-benzyl-1-hydroxy-1,3-dihydrobenzo[c][1,2]oxaborole-6-carboxamide (DS54);
[0522] (S)—N-(3-amino-2-(1-hydroxy-1,3-dihydrobenzo[c][1,2]oxaborole-6-carboxamido)-3-oxopropyl)-1-hydroxy-N-(4-(trifluoromethyl)benzyl)-1,3-dihydrobenzo[c][1,2]oxaborole-6-carboxamide (DS55);
[0523] (S)—N-(3-amino-2-(1-hydroxy-1,3-dihydrobenzo[c][1,2]oxaborole-6-carboxamido)-3-oxopropyl)-N-ethyl-1-hydroxy-1,3-dihydrobenzo[c][1,2]oxaborole-6-carboxamide (DS56);
[0524] (S)—N-(3-amino-2-(1-hydroxy-1,3-dihydrobenzo[c][1,2]oxaborole-6-carboxamido)-3-oxopropyl)-1-hydroxy-N-propyl-1,3-dihydrobenzo[c][1,2]oxaborole-6-carboxamide (DS57);
[0525] (S)—N-(3-amino-2-(1-hydroxy-1,3-dihydrobenzo[c][1,2]oxaborole-6-carboxamido)-3-oxopropyl)-1-hydroxy-N-isobutyl-1,3-dihydrobenzo[c][1,2]oxaborole-6-carboxamide (DS58);
[0526] (S)—N-(3-amino-2-(1-hydroxy-1,3-dihydrobenzo[c][1,2]oxaborole-6-carboxamido)-3-oxopropyl)-1-hydroxy-N-((5-(thiophen-2-yl)pyridin-2-yl)methyl)-1,3-dihydrobenzo[c][1,2]oxaborole-6-carboxamide (DS59);
[0527] (S)—N-(3-amino-2-(1-hydroxy-1,3-dihydrobenzo[c][1,2]oxaborole-6-carboxamido)-3-oxopropyl)-1-hydroxy-N-isopentyl-1,3-dihydrobenzo[c][1,2]oxaborole-6-carboxamide (DS60);
[0528] (S)—N-(3-amino-2-(1-hydroxy-1,3-dihydrobenzo[c][1,2]oxaborole-6-carboxamido)-3-oxopropyl)-1-hydroxy-N-(quinolin-5-ylmethyl)-1,3-dihydrobenzo[c][1,2]oxaborole-6-carboxamide (DS61);
[0529] (S)—N-(3-amino-2-(1-hydroxy-1,3-dihydrobenzo[c][1,2]oxaborole-6-carboxamido)-3-oxopropyl)-1-hydroxy-N-(2-(trifluoromethoxy)benzyl)-1,3-dihydrobenzo[c][1,2]oxaborole-6-carboxamide (DS62);
[0530] (S)—N-(3-amino-2-(1-hydroxy-1,3-dihydrobenzo[c][1,2]oxaborole-6-carboxamido)-3-oxopropyl)-1-hydroxy-N-(4-(methylsulfonyl)benzyl)-1,3-dihydrobenzo[c][1,2]oxaborole-6-carboxamide (DS63);
[0531] (3-((2S,4S)-4-(5-borono-2-(methylsulfonyl)benzamido)-2-carbamoylpyrrolidine-1-carbonyl)-4-(methylsulfonyl)phenyl)boronic acid (DS64);
[0532] (4-(((3S,5S)-1-(4-borono-2,6-difluorobenzoyl)-5-carbamoylpyrrolidin-3-yl)carbamoyl)-3,5-difluorophenyl)boronic acid (DS65);
[0533] (R,E)-4,5-bis(1-hydroxy-1,3-dihydrobenzo[c][1,2]oxaborole-6-carboxamido)pent-2-enoic acid (DS66);
[0534] (2S,4S)-1-(1-hydroxy-4-(trifluoromethyl)-1,3-dihydrobenzo[c][1,2]oxaborole-6-carbonyl)-4-(1-hydroxy-4-(trifluoromethyl)-1,3-dihydrobenzo[c][1,2]oxaborole-6-carboxamido)pyrrolidine-2-carboxamide (DS67);
[0535] N,N′-((2S,3S)-1-amino-1-oxobutane-2,3-diyl)bis(1-hydroxy-1,3-dihydrobenzo[c][1,2]oxaborole-6-carboxamide) (DS68);
[0536] (R)-3,4-bis(1-hydroxy-1,3-dihydrobenzo[c][1,2]oxaborole-6-carboxamido)butanoic acid (DS69);
[0537] 3-((2S,4S)-1-(1-hydroxy-1,3-dihydrobenzo[c][1,2]oxaborole-6-carbonyl)-4-(1-hydroxy-1,3-dihydrobenzo[c][1,2]oxaborole-6-carboxamido)pyrrolidine-2-carboxamido)propanoic acid (DS70);
[0538] (S)-3-(1-hydroxy-1,3-dihydrobenzo[c][1,2]oxaborole-5-carboxamido)-4-(1-hydroxy-1,3-dihydrobenzo[c][1,2]oxaborole-6-carboxamido)butanoic acid (DS71);
[0539] (R)-4-(1-hydroxy-1,3-dihydrobenzo[c][1,2]oxaborole-5-carboxamido)-5-(1-hydroxy-1,3-dihydrobenzo[c][1,2]oxaborole-6-carboxamido)pentanoic acid (DS72);
[0540] (2S,4R)-1-(1-hydroxy-1,3-dihydrobenzo[c][1,2]oxaborole-6-carbonyl)-4-(1-hydroxy-1,3-dihydrobenzo[c][1,2]oxaborole-6-carboxamido)pyrrolidine-2-carboxylic acid (DS73);
[0541] (2S,4R)-1-(1-hydroxy-4-(trifluoromethyl)-1,3-dihydrobenzo[c][1,2]oxaborole-6-carbonyl)-4-(1-hydroxy-4-(trifluoromethyl)-1,3-dihydrobenzo[c][1,2]oxaborole-6-carboxamido)pyrrolidine-2-carboxylic acid (DS74);
[0542] (2S,3S)-3-(1-hydroxy-4-(trifluoromethyl)-1,3-dihydrobenzo[c][1,2]oxaborole-6-carboxamido)-2-(1-hydroxy-7-(trifluoromethyl)-1,3-dihydrobenzo[c][1,2]oxaborole-5-carboxamido)butanoic acid (DS75);
[0543] (R)-5-(1-hydroxy-4-(trifluoromethyl)-1,3-dihydrobenzo[c][1,2]oxaborole-6-carboxamido)-4-(1-hydroxy-7-(trifluoromethyl)-1,3-dihydrobenzo[c][1,2]oxaborole-5-carboxamido)pentanoic acid (DS76);
[0544] ((2S,4S)-1-(5-borono-2-nitrobenzoyl)-4-(1-hydroxy-1,3-dihydrobenzo[c][1,2]oxaborole-6-carboxamido)pyrrolidine-2-carbonyl)glycine (DS77);
[0545] ((2S,4S)-1-(5-borono-2-(methylsulfonyl)benzoyl)-4-(1-hydroxy-1,3-dihydrobenzo[c][1,2]oxaborole-6-carboxamido)pyrrolidine-2-carbonyl)glycine (DS78);
[0546] ((2S,4S)-1-(3-borono-2,6-difluorobenzoyl)-4-(1-hydroxy-1,3-dihydrobenzo[c][1,2]oxaborole-6-carboxamido)pyrrolidine-2-carbonyl)glycine (DS79);
[0547] (S)-(3-((3-borono-4-fluorobenzyl)(5,6-diamino-6-oxohexyl)carbamoyl)-5-nitrophenyl)boronic acid (DS80);
[0548] (S)-(3-((4-borono-3,5-difluorobenzyl)(5,6-diamino-6-oxohexyl)carbamoyl)-5-nitrophenyl)boronic acid (DS81);
[0549] (S)-(3-((3-boronobenzyl)(5,6-diamino-6-oxohexyl)carbamoyl)-5-nitrophenyl)boronic acid (DS82);
[0550] (S)-(3-((4-borono-2-methoxybenzyl)(5,6-diamino-6-oxohexyl)carbamoyl)-5-nitrophenyl)boronic acid (DS83);
[0551] (S)-(3-((4-borono-2-(trifluoromethyl)benzyl)(5,6-diamino-6-oxohexyl)carbamoyl)-5-nitrophenyl)boronic acid (DS84);
[0552] (S)-(5-((3-borono-N-(5,6-diamino-6-oxohexyl)-4-fluorobenzamido)methyl)-2-fluorophenyl)boronic acid (DS85);
[0553] (S)-(5-((4-borono-3,5-difluorobenzyl)(5,6-diamino-6-oxohexyl)carbamoyl)-2-fluorophenyl)boronic acid (DS86);
[0554] (S)-(3-((3-borono-N-(5,6-diamino-6-oxohexyl)-4-fluorobenzamido)methyl) phenyl)boronic acid (DS87);
[0555] (S)-(5-((4-borono-2-methoxybenzyl)(5,6-diamino-6-oxohexyl)carbamoyl)-2-fluorophenyl)boronic acid (DS88);
[0556] (S)-(5-((4-borono-3-(trifluoromethyl)benzyl)(5,6-diamino-6-oxohexyl)carbamoyl)-2-fluorophenyl)boronic acid (DS89);
[0557] (S)-(4-((3-borono-4-fluorobenzyl)(5,6-diamino-6-oxohexyl)carbamoyl)-2-fluorophenyl)boronic acid (DS90);
[0558] (S)-(4-((4-borono-3,5-difluorobenzyl)(5,6-diamino-6-oxohexyl)carbamoyl)-2-fluorophenyl)boronic acid (DS91);
[0559] (S)-(4-((3-boronobenzyl)(5,6-diamino-6-oxohexyl)carbamoyl)-2-fluorophenyl)boronic acid (DS92);
[0560] (S)-(4-((4-borono-2-methoxybenzyl)(5,6-diamino-6-oxohexyl)carbamoyl)-2-fluorophenyl)boronic acid (DS93);
[0561] (S)-(4-((4-borono-2-(trifluoromethyl)benzyl)(5,6-diamino-6-oxohexyl)carbamoyl)-2-fluorophenyl)boronic acid (DS94);
[0562] (S)-(5-((3-borono-5-bromo-N-(5,6-diamino-6-oxohexyl)benzamido)methyl)-2-fluorophenyl)boronic acid (DS95);
[0563] (S)-(3-((4-borono-3,5-difluorobenzyl)(5,6-diamino-6-oxohexyl)carbamoyl)-5-bromophenyl)boronic acid (DS96);
[0564] (S)-(3-((3-borono-5-bromo-N-(5,6-diamino-6-oxohexyl)benzamido)methyl) phenyl)boronic acid (DS97);
[0565] (S)-(3-((3-borono-5-bromo-N-(5,6-diamino-6-oxohexyl)benzamido)methyl)-5-methoxyphenyl)boronic acid (DS98);
[0566] (S)-(3-((4-borono-2-(trifluoromethyl)benzyl)(5,6-diamino-6-oxohexyl)carbamoyl)-5-bromophenyl)boronic acid (DS99);
[0567] (S)-(3-((3-borono-4-fluorobenzyl)(5,6-diamino-6-oxohexyl)carbamoyl)-5-fluorophenyl)boronic acid (DS100);
[0568] (S)-(3-((4-borono-3-methoxybenzyl)(5,6-diamino-6-oxohexyl)carbamoyl)-5-fluorophenyl)boronic acid (DS101);
[0569] (S)-(3-((4-borono-2-(trifluoromethyl)benzyl)(5,6-diamino-6-oxohexyl)carbamoyl)-5-fluorophenyl)boronic acid (DS102);
[0570] (S)-(4-((N-(5,6-diamino-6-oxohexyl)-1-hydroxy-1,3-dihydrobenzo[c][1,2]oxaborole-6-carboxamido)methyl)-2-fluorophenyl)boronic acid (DS103);
[0571] (S)-(4-((N-(5,6-diamino-6-oxohexyl)-1-hydroxy-1,3-dihydrobenzo[c][1,2]oxaborole-6-carboxamido)methyl)-2,6-difluorophenyl)boronic acid (DS104);
[0572] (S)-(3-((N-(5,6-diamino-6-oxohexyl)-1-hydroxy-1,3-dihydrobenzo[c][1,2]oxaborole-6-carboxamido)methyl)phenyl)boronic acid (DS105);
[0573] (S)-(4-((N-(5,6-diamino-6-oxohexyl)-1-hydroxy-1,3-dihydrobenzo[c][1,2]oxaborole-6-carboxamido)methyl)-3-methoxyphenyl)boronic acid (DS106);
[0574] (S)—N-(5,6-diamino-6-oxohexyl)-1-hydroxy-N-((1-hydroxy-1,3-dihydrobenzo[c][1,2]oxaborol-6-yl)methyl)-1,3-dihydrobenzo[c][1,2]oxaborole-6-carboxamide (DS107);
[0575] (S)—N-(4-amino-3-(1-hydroxy-1,3-dihydrobenzo[c][1,2]oxaborole-6-carboxamido)-4-oxobutyl)-1-hydroxy-N-((1-hydroxy-1,3-dihydrobenzo[c][1,2]oxaborol-6-yl)methyl)-1,3-dihydrobenzo[c][1,2]oxaborole-6-carboxamide (DS108);
[0576] (S)—N-(6-amino-5-(1-hydroxy-1,3-dihydrobenzo[c][1,2]oxaborole-6-carboxamido)-6-oxohexyl)-1-hydroxy-N-((1-hydroxy-1,3-dihydrobenzo[c][1,2]oxaborol-6-yl)methyl)-1,3-dihydrobenzo[c][1,2]oxaborole-6-carboxamide (DS109);
[0577] (2S,4S)-1-(1-hydroxy-1,3-dihydrobenzo[c][1,2]oxaborole-6-carbonyl)-4-(1-hydroxy-1,3-dihydrobenzo[c][1,2]oxaborole-6-carboxamido)pyrrolidine-2-carboxylic acid (DS110);
[0578] (2S,3S)-2-(1-hydroxy-1,3-dihydrobenzo[c][1,2]oxaborole-5-carboxamido)-3-(1-hydroxy-1,3-dihydrobenzo[c][1,2]oxaborole-6-carboxamido)butanoic acid (DS111); and
[0579] (2S,4R)-1-(1-hydroxy-1,3-dihydrobenzo[c][1,2]oxaborole-6-carbonyl)-4-(1-hydroxy-1,3-dihydrobenzo[c][1,2]oxaborole-6-carboxamido)pyrrolidine-2-carboxylic acid (DS112).

[0580] In at least one embodiment, the compound of the present disclosure may be used, as an intermediate in the manufacture of a drug substance or a therapeutic of a prophylactic compound.

[0581] In another aspect, the disclosure provides a human insulin analog, comprising an A-chain and a B-chain, wherein the sequence of the A-chain comprises:

X_{aa′}X_{bb′}X_{cc′}X_{dd′}X_{ee′}X_{ff′}X_{gg′}VEQCCX_{hh′}X_{ii′}JCSLYQLENYCNX_{jj′}X_{kk′}X_{ll′}X_{mm′}X_{nn′}X_{oo′}X_{pp′} (SEQ ID NO:24015); and wherein the sequence of the B-chain comprises:
[0582] (i)

(SEQ ID NO: 24016)
XₐₐX_{bb}X_{cc}X_{dd}KXₑₑX_{ff}X_{gg}XₕₕXᵢᵢXⱼⱼKXₖₖXₗₗXₘₘXₙₙQHLCGSHLVEALYLVC
XₒₒXₚₚX_{qq}GFFYTXᵣᵣXₛₛXₜₜXᵤᵤXᵥᵥX_{ww},

[0583] wherein X_{aa′}, X_{bb′}, X_{cc′}, X_{dd′}, X_{ee′}, X_{ff′}, X_{gg′}, X_{hh′}, X_{ii′}, X_{jj′}, X_{kk′}, X_{ll′}, X_{mm′}, X_{nn′}, X_{oo′}, X_{pp′}, Xₐₐ, X_{bb}, X_{cc}, X_{dd}, Xₑₑ, X_{ff}, X_{gg}, Xₕₕ, Xᵢᵢ, Xⱼⱼ, Xₖₖ, Xₗₗ, Xₘₘ, Xₙₙ, Xₒₒ, Xₚₚ, X_{qq}, Xᵣᵣ, Xₛₛ, Xₜₜ, Xᵤᵤ, Xᵥᵥ, and X_{ww} are each independently either absent or selected from amino acid residues A, D, E, F, G, H, I, K, L, N, P, Q, R, S, T, V, Y and W,
[0584] (ii)

(SEQ ID NO: 24017)
XₐₐX_{bb}X_{cc}X_{dd}KPXₑₑX_{ff}X_{gg}XₕₕXᵢᵢXⱼⱼXₖₖXₗₗXₘₘXₙₙQHLCGSHLVEALYLVC
XₒₒXₚₚX_{qq}GFFYTXᵣᵣXₛₛXₜₜXᵤᵤXᵥᵥX_{ww},

[0585] wherein X_{aa′}, X_{bb′}, X_{cc′}, X_{dd′}, X_{ee′}, X_{ff′}, X_{gg′}, X_{hh′}, X_{ii′}, X_{jj′}, X_{kk′}, X_{ll′}, X_{mm′}, X_{nn′}, X_{oo′}, X_{pp′}, Xₐₐ, X_{bb}, X_{cc}, X_{dd}, X_{ff}, X_{gg}, Xₕₕ, Xᵢᵢ, Xⱼⱼ, Xₖₖ, Xₗₗ, Xₘₘ, Xₙₙ, Xₒₒ, Xₚₚ, X_{qq}, Xᵣᵣ, Xₛₛ, Xₜₜ, Xᵤᵤ, Xᵥᵥ, and X_{ww} are each independently either absent or selected from amino acid residues A, D, E, F, G, H, I, K, L, N, P, Q, R, S, T, V, Y and W, and wherein Xₑₑ is selected from amino acid residues A, E, F, H, I, K, L, N, P, Q, R, S, T, V, Y and W,
[0586] (iii)

(SEQ ID NO: 24018)
XₐₐX_{bb}X_{cc}X_{dd}KXₑₑX_{ff}X_{gg}XₕₕXᵢᵢXⱼⱼKXₖₖXₗₗXₘₘXₙₙQHLCGSHLVEALYLVC
XₒₒXₚₚX_{qq}GFFYTXᵣᵣXₛₛXₜₜXᵤᵤXᵥᵥX_{ww},

[0587] wherein X_{aa′}, X_{bb′}, X_{cc′}, X_{dd′}, X_{ee′}, X_{ff′}, X_{gg′}, X_{hh′}, X_{ii′}, X_{jj′}, X_{kk′}, X_{ll′}, X_{mm′}, X_{nn′}, X_{oo′}, X_{pp′}, Xₐₐ, X_{bb}, X_{cc}, X_{dd}, Xₑₑ, X_{ff}, X_{gg}, Xₕₕ, Xᵢᵢ, Xⱼⱼ, Xₖₖ, Xₗₗ, Xₘₘ, Xₙₙ, Xₒₒ, Xₚₚ, X_{qq}, Xᵣᵣ, Xₛₛ, Xₜₜ, Xᵤᵤ, Xᵥᵥ, and X_{ww}, are each independently either absent or selected from amino acid residues A, D, E, F, G, H, I, K, L, N, P, Q, R, S, T, V, Y, W and at least one of Xₑₑ, X_{ff}, X_{gg}, Xₕₕ, Xᵢᵢ, Xⱼⱼ is present and at least one of Xₑₑ, X_{ff}, X_{gg}, Xₕₕ, Xᵢᵢ, Xⱼⱼ is G,
[0588] (iv)

(SEQ ID NO: 24019)
XₐₐX_{bb}X_{cc}X_{dd}KXₑₑX_{ff}X_{gg}XₕₕXᵢᵢXⱼⱼKXₖₖXₗₗXₘₘXₙₙQHLCGSHLVEALYLVC
XₒₒXₚₚX_{gg}GFFYTXᵣᵣXₛₛXₜₜXᵤᵤXᵥᵥX_{ww},

[0589] wherein X_{aa′}, X_{bb′}, X_{cc′}, X_{dd′}, X_{ee′}, X_{ff′}, X_{gg′}, X_{hh′}, X_{ii′}, X_{jj′}, X_{kk′}, X_{ll′}, X_{mm′}, X_{nn′}, X_{oo′}, X_{pp′}, Xₐₐ, X_{bb}, X_{cc}, X_{dd}, Xₑₑ, X_{ff}, X_{gg}, Xₕₕ, Xᵢᵢ, Xⱼⱼ, Xₖₖ, Xₗₗ, Xₘₘ, Xₙₙ, Xₒₒ, Xₚₚ, X_{qq}, Xᵣᵣ, Xₛₛ, Xₜₜ, Xᵤᵤ, Xᵥᵥ, and X_{ww} are each independently either absent or selected from amino acid residues A, D, E, F, G, H, I, K, L, N, P, Q, R, S, T, V, Y, W and at least one of Xₑₑ, X_{ff}, X_{gg}, Xₕₕ, Xᵢᵢ, Xⱼⱼ is present and at least one of Xₑₑ, X_{ff}, X_{gg}, Xₕₕ, Xᵢᵢ, Xⱼⱼ is S, or
[0590] (v)

(SEQ ID NO: 24020)
XₐₐX_{bb}X_{cc}X_{dd}KXₑₑX_{ff}X_{gg}XₕₕXᵢᵢXⱼⱼKXₖₖXₗₗXₘₘXₙₙQHLCGSHLVEALYLVC
XₒₒXₚₚX_{qq}GFFYTXᵣᵣXₛₛXₜₜXᵤᵤXᵥᵥX_{ww},

[0591] wherein X_{aa′}, X_{bb′}, X_{cc′}, X_{dd′}, X_{ee′}, X_{ff′}, X_{gg′}, X_{hh′}, X_{ii′}, X_{jj′}, X_{kk′}, X_{ll′}, X_{mm′}, X_{nn′}, X_{oo′}, X_{pp′}, Xₐₐ, X_{bb}, X_{cc}, X_{dd}, Xₑₑ, X_{ff}, X_{gg}, Xₕₕ, Xᵢᵢ, Xⱼⱼ, Xₖₖ, Xₗₗ, Xₘₘ, Xₙₙ, Xₒₒ, Xₚₚ, X_{qq}, Xᵣᵣ, Xₛₛ, Xₜₜ, Xᵤᵤ, Xᵥᵥ, and X_{ww} are each independently either absent or selected from amino acid residues A, D, E, F, G, H, I, K, L, N, P, Q, R, S, T, V, Y, W and at least two of Xₑₑ, X_{ff}, X_{gg}, Xₕₕ, Xᵢᵢ, Xⱼⱼ are present and at least one of Xₑₑ, X_{ff}, X_{gg}, Xₕₕ, Xᵢᵢ, Xⱼⱼ is S, and another is G.

[0592] In some embodiments, the A-chain comprises a sequence selected from SEQ ID NOs 1 and 3 to 33, and is optionally appended at the N-terminus and/or at the C-terminus by at least one selected from KA, KD, KE, KF, KG, KH, KI, KL, KN, KP, KQ, KR, KS, KT, KY, KAA, KAD, KAE, KAF, KAG, KAH, KAI, KAL, KAN, KAQ, KAR, KAS, KAT, KAY, KDA, KDD, KDE, KDF, KDG, KDH, KDI, KDL, KDN, KDQ, KDR, KDS, KDT, KDY, KEA, KED, KEE, KEF, KEG, KEH, KEI, KEL, KEN, KEQ, KER, KES, KET, KEY, KFA, KFD, KFE, KFF, KFG, KFH, KFI, KFL, KFN, KFQ, KFR, KFS, KFT, KFY, KGA, KGD, KGE, KGF, KGG, KGH, KGI, KGL, KGN, KGQ, KGR, KGS, KGT, KGY, KHA, KHD, KHE, KHF, KHG, KHH, KHI, KHL, KHN, KHQ, KHR, KHS, KHT, KHY, KIA, KID, KIE, KIF, KIG, KIH, KII, KIL, KIN, KIQ, KIR, KIS, KIT, KIY, KLA, KLD, KLE, KLF, KLG, KLH, KLI, KLL, KLN, KLQ, KLR, KLS, KLT, KLY, KNA, KND, KNE, KNF, KNG, KNH, KNI, KNL, KNN, KNQ, KNR, KNS, KNT, KNY, KPA, KPD, KPE, KPF, KPG, KPH, KPI, KPL, KPN, KPQ, KPR, KPS, KPT, KPY, KQA, KQD, KQE, KQF, KQG, KQH, KQI, KQL, KQN, KQQ, KQR, KQS, KQT, KQY, KRA, KRD, KRE, KRF, KRG, KRH, KRI, KRL, KRN, KRQ, KRR, KRS, KRT, KRY, KSA, KSD, KSE, KSF, KSG, KSH, KSI, KSL, KSN, KSQ, KSR, KSS, KST, KSY, KTA, KTD, KTE, KTF, KTG, KTH, KTI, KTL, KTN, KTQ, KTR, KTS, KTT, KTY, KYA, KYD, KYE, KYF, KYG, KYH, KYI, KYL, KYN, KYQ, KYR, KYS, KYT, KYY and SEQ ID NOs 75 to 24014, 24037-24046, and wherein the B-chain comprises at least one of SEQ ID NOs 2 and 34 to 74, 24047, and 24048, and is optionally appended at the N-terminus and/or at the C-terminus by at least one selected from KA, KD, KE, KF, KG, KH, KI, KL, KN, KP, KQ, KR, KS, KT, KY, KAA, KAD, KAE, KAF, KAG, KAH, KAI, KAL, KAN, KAQ, KAR, KAS, KAT, KAY, KDA, KDD, KDE, KDF, KDG, KDH, KDI, KDL, KDN, KDQ, KDR, KDS, KDT, KDY, KEA, KED, KEE, KEF, KEG, KEH, KEI, KEL, KEN, KEQ, KER, KES, KET, KEY, KFA, KFD, KFE, KFF, KFG, KFH, KFI, KFL, KFN, KFQ, KFR, KFS, KFT, KFY, KGA, KGD, KGE, KGF, KGG, KGH, KGI, KGL, KGN, KGQ, KGR, KGS, KGT, KGY, KHA, KHD, KHE, KHF, KHG, KHH, KHI, KHL, KHN, KHQ, KHR, KHS, KHT, KHY, KIA, KID, KIE, KIF, KIG, KIH, KII, KIL, KIN, KIQ, KIR, KIS, KIT, KIY, KLA, KLD, KLE, KLF, KLG, KLH, KLI, KLL, KLN, KLQ, KLR, KLS, KLT, KLY, KNA, KND, KNE, KNF, KNG, KNH, KNI, KNL, KNN, KNQ, KNR, KNS, KNT, KNY, KPA, KPD, KPE, KPF, KPG, KPH, KPI, KPL, KPN, KPQ, KPR, KPS, KPT, KPY, KQA, KQD, KQE, KQF, KQG, KQH, KQI, KQL, KQN, KQQ, KQR, KQS, KQT, KQY, KRA, KRD, KRE, KRF, KRG, KRH, KRI, KRL, KRN, KRQ, KRR, KRS, KRT, KRY, KSA, KSD, KSE, KSF, KSG, KSH, KSI, KSL, KSN, KSQ, KSR, KSS, KST, KSY, KTA, KTD, KTE, KTF, KTG, KTH, KTI, KTL, KTN, KTQ, KTR, KTS, KTT, KTY, KYA, KYD, KYE, KYF, KYG, KYH, KYI, KYL, KYN, KYQ, KYR, KYS, KYT, KYY and SEQ ID NOs 75 to 24014, 24037-24046.

[0593] In some embodiments, the A-chain comprises a sequence selected from SEQ ID NOs 1 and 3 to 33, the B-chain comprises at least one of SEQ ID NOs 2 and 34 to 74, 24047, and 24048, and
[0594] (a)
[0595] the A-chain and the B-chain are each independently and optionally appended at the N-terminus and/or at the C-terminus by at least one selected from:
[0596] KA, KD, KE, KF, KG, KH, KI, KL, KN, KP, KQ, KR, KS, KT, KY, KAA, KAD, KAE, KAF, KAG, KAH, KAI, KAL, KAN, KAQ, KAR, KAS, KAT, KAY, KDA, KDD, KDE, KDF, KDG, KDH, KDI, KDL, KDN, KDQ, KDR, KDS, KDT, KDY, KEA, KED, KEE, KEF, KEG, KEH, KEI, KEL, KEN, KEQ, KER, KES, KET, KEY, KFA, KFD, KFE, KFF, KFG, KFH, KFI, KFL, KFN, KFQ, KFR, KFS, KFT, KFY, KGA, KGD, KGE, KGF, KGG, KGH, KGI, KGL, KGN, KGQ, KGR, KGS, KGT, KGY, KHA, KHD, KHE, KHF, KHG, KHH, KHI, KHL, KHN, KHQ, KHR, KHS, KHT, KHY, KIA, KID, KIE, KIF, KIG, KIH, KII, KIL, KIN, KIQ, KIR, KIS, KIT, KIY, KLA, KLD, KLE, KLF, KLG, KLH, KLI, KLL, KLN, KLQ, KLR, KLS, KLT, KLY, KNA, KND, KNE, KNF, KNG, KNH, KNI, KNL, KNN, KNQ, KNR, KNS, KNT, KNY, KPA, KPD, KPE, KPF, KPG, KPH, KPI, KPL, KPN, KPQ, KPR, KPS, KPT, KPY, KQA, KQD, KQE, KQF, KQG, KQH, KQI, KQL, KQN, KQQ, KQR, KQS, KQT, KQY, KRA, KRD, KRE, KRF, KRG, KRH, KRI, KRL, KRN, KRQ, KRR, KRS, KRT, KRY, KSA, KSD, KSE, KSF, KSG, KSH, KSI, KSL, KSN, KSQ, KSR, KSS, KST, KSY, KTA, KTD, KTE, KTF, KTG, KTH, KTI, KTL, KTN, KTQ, KTR, KTS, KTT, KTY, KYA, KYD, KYE, KYF, KYG, KYH, KYI, KYL, KYN, KYQ, KYR, KYS, KYT, KYY,
[0597] SEQ ID NOs 75 to 24014, 24037-24046,
[0598] KA, KD, KE, KF, KG, KH, KI, KL, KN, KP, KQ, KR, KS, KT, KY, KAA, KAD, KAE, KAF, KAG, KAH, KAI, KAL, KAN, KAQ, KAR, KAS, KAT, KAY, KDA, KDD, KDE, KDF, KDG, KDH, KDI, KDL, KDN, KDQ, KDR, KDS, KDT, KDY, KEA, KED, KEE, KEF, KEG, KEH, KEI, KEL, KEN, KEQ, KER, KES, KET, KEY, KFA, KFD, KFE, KFF, KFG, KFH, KFI, KFL, KFN, KFQ, KFR, KFS, KFT, KFY, KGA, KGD, KGE, KGF, KGG, KGH, KGI, KGL, KGN, KGQ, KGR, KGS, KGT, KGY, KHA, KHD, KHE, KHF, KHG, KHH, KHI, KHL, KHN, KHQ, KHR, KHS, KHT, KHY, KIA, KID, KIE, KIF, KIG, KIH, KII, KIL, KIN, KIQ, KIR, KIS, KIT, KIY, KLA, KLD, KLE, KLF, KLG, KLH, KLI, KLL, KLN, KLQ, KLR, KLS, KLT, KLY, KNA, KND, KNE, KNF, KNG, KNH, KNI, KNL, KNN, KNQ, KNR, KNS, KNT, KNY, KPA, KPD, KPE, KPF, KPG, KPH, KPI, KPL, KPN, KPQ, KPR, KPS, KPT, KPY, KQA, KQD, KQE, KQF, KQG, KQH, KQI, KQL, KQN, KQQ, KQR, KQS, KQT, KQY, KRA, KRD, KRE, KRF, KRG, KRH, KRI, KRL, KRN, KRQ, KRR, KRS, KRT, KRY, KSA, KSD, KSE, KSF, KSG, KSH, KSI, KSL, KSN, KSQ, KSR, KSS, KST, KSY, KTA, KTD, KTE, KTF, KTG, KTH, KTI, KTL, KTN, KTQ, KTR, KTS, KTT, KTY, KYA, KYD, KYE, KYF, KYG, KYH, KYI, KYL, KYN, KYQ, KYR, KYS, KYT, KYY and,
[0599] KA, KD, KE, KF, KG, KH, KI, KL, KN, KP, KQ, KR, KS, KT, KY and SEQ ID NOs 75 to 3224,
[0600] KA, KD, KE, KF, KG, KH, KI, KL, KN, KP, KQ, KR, KS, KT, KY and SEQ ID NOs 3225 to 6374,
[0601] KA, KD, KE, KF, KG, KH, KI, KL, KN, KP, KQ, KR, KS, KT, KY and SEQ ID NOs 6375 to 15194,
[0602] KA, KD, KE, KF, KG, KH, KI, KL, KN, KP, KQ, KR, KS, KT, KY and SEQ ID NOs 15195 to 18134,
[0603] KA, KD, KE, KF, KG, KH, KI, KL, KN, KP, KQ, KR, KS, KT, KY and SEQ ID NOs 18135 to 21074, and
[0604] KA, KD, KE, KF, KG, KH, KI, KL, KN, KP, KQ, KR, KS, KT, KY and SEQ ID NOs 21075 to 24014, 24037-24046, or
[0605] (b)
[0606] both the N-terminus and the C-terminus of the B-chain are independently covalently conjugated, via a peptide bond, to one selected from:
[0607] KA, KD, KE, KF, KG, KH, KI, KL, KN, KP, KQ, KR, KS, KT, KY, KAA, KAD, KAE, KAF, KAG, KAH, KAI, KAL, KAN, KAQ, KAR, KAS, KAT, KAY, KDA, KDD, KDE, KDF, KDG, KDH, KDI, KDL, KDN, KDQ, KDR, KDS, KDT, KDY, KEA, KED, KEE, KEF, KEG, KEH, KEI, KEL, KEN, KEQ, KER, KES, KET, KEY, KFA, KFD, KFE, KFF, KFG, KFH, KFI, KFL, KFN, KFQ, KFR, KFS, KFT, KFY, KGA, KGD, KGE, KGF, KGG, KGH, KGI, KGL, KGN, KGQ, KGR, KGS, KGT, KGY, KHA, KHD, KHE, KHF, KHG, KHH, KHI, KHL, KHN, KHQ, KHR, KHS, KHT, KHY, KIA, KID, KIE, KIF, KIG, KIH, KII, KIL, KIN, KIQ, KIR, KIS, KIT, KIY, KLA, KLD, KLE, KLF, KLG, KLH, KLI, KLL, KLN, KLQ, KLR, KLS, KLT, KLY, KNA, KND, KNE, KNF, KNG, KNH, KNI, KNL, KNN, KNQ, KNR, KNS, KNT, KNY, KPA, KPD, KPE, KPF, KPG, KPH, KPI, KPL, KPN, KPQ, KPR, KPS, KPT, KPY, KQA, KQD, KQE, KQF, KQG, KQH, KQI, KQL, KQN, KQQ, KQR, KQS, KQT, KQY, KRA, KRD, KRE, KRF, KRG, KRH, KRI, KRL, KRN, KRQ, KRR, KRS, KRT, KRY, KSA, KSD, KSE, KSF, KSG, KSH, KSI, KSL, KSN, KSQ, KSR, KSS, KST, KSY, KTA, KTD, KTE, KTF, KTG, KTH, KTI, KTL, KTN, KTQ, KTR, KTS, KTT, KTY, KYA, KYD, KYE, KYF, KYG, KYH, KYI, KYL, KYN, KYQ, KYR, KYS, KYT, KYY, SEQ ID NOs 75 to 24014, 24037-24036,
[0608] KA, KD, KE, KF, KG, KH, KI, KL, KN, KP, KQ, KR, KS, KT, KY, KAA, KAD, KAE, KAF, KAG, KAH, KAI, KAL, KAN, KAQ, KAR, KAS, KAT, KAY, KDA, KDD, KDE, KDF, KDG, KDH, KDI, KDL, KDN, KDQ, KDR, KDS, KDT, KDY, KEA, KED, KEE, KEF, KEG, KEH, KEI, KEL, KEN, KEQ, KER, KES, KET, KEY, KFA, KFD, KFE, KFF, KFG, KFH, KFI, KFL, KFN, KFQ, KFR, KFS, KFT, KFY, KGA, KGD, KGE, KGF, KGG, KGH, KGI, KGL, KGN, KGQ, KGR, KGS, KGT, KGY, KHA, KHD, KHE, KHF, KHG, KHH, KHI, KHL, KHN, KHQ, KHR, KHS, KHT, KHY, KIA, KID, KIE, KIF, KIG, KIH, KII, KIL, KIN, KIQ, KIR, KIS, KIT, KIY, KLA, KLD, KLE, KLF, KLG, KLH, KLI, KLL, KLN, KLQ, KLR, KLS, KLT, KLY, KNA, KND, KNE, KNF, KNG, KNH, KNI, KNL, KNN, KNQ, KNR, KNS, KNT, KNY, KPA, KPD, KPE, KPF, KPG, KPH, KPI, KPL, KPN, KPQ, KPR, KPS, KPT, KPY, KQA, KQD, KQE, KQF, KQG, KQH, KQI, KQL, KQN, KQQ, KQR, KQS, KQT, KQY, KRA, KRD, KRE, KRF, KRG, KRH, KRI, KRL, KRN, KRQ, KRR, KRS, KRT, KRY, KSA, KSD, KSE, KSF, KSG, KSH, KSI, KSL, KSN, KSQ, KSR, KSS, KST, KSY, KTA, KTD, KTE, KTF, KTG, KTH, KTI, KTL, KTN, KTQ, KTR, KTS, KTT, KTY, KYA, KYD, KYE, KYF, KYG, KYH, KYI, KYL, KYN, KYQ, KYR, KYS, KYT, KYY,
[0609] KA, KD, KE, KF, KG, KH, KI, KL, KN, KP, KQ, KR, KS, KT, KY and SEQ ID NOs 75 to 3224,
[0610] KA, KD, KE, KF, KG, KH, KI, KL, KN, KP, KQ, KR, KS, KT, KY and SEQ ID NOs 3225 to 6374,
[0611] KA, KD, KE, KF, KG, KH, KI, KL, KN, KP, KQ, KR, KS, KT, KY and SEQ ID NOs 6375 to 15194,
[0612] KA, KD, KE, KF, KG, KH, KI, KL, KN, KP, KQ, KR, KS, KT, KY and SEQ ID NOs 15195 to 18134,
[0613] KA, KD, KE, KF, KG, KH, KI, KL, KN, KP, KQ, KR, KS, KT, KY and SEQ ID NOs 18135 to 21074, and
[0614] KA, KD, KE, KF, KG, KH, KI, KL, KN, KP, KQ, KR, KS, KT, KY and SEQ ID NOs 21075 to 24014, 24037-24036.

[0615] In some embodiments, the A-chain comprises a sequence selected from SEQ ID NOs 1 and 3 to 33, and is optionally appended at the N-terminus and/or at the C-terminus by at least one selected from KA, KD, KE, KF, KG, KH, KI, KL, KN, KP, KQ, KR, KS, KT, KY, KAA, KAD, KAE, KAF, KAG, KAH, KAI, KAL, KAN, KAQ, KAR, KAS, KAT, KAY, KDA, KDD, KDE, KDF, KDG, KDH, KDI, KDL, KDN, KDQ, KDR, KDS, KDT, KDY, KEA, KED, KEE, KEF, KEG, KEH, KEI, KEL, KEN, KEQ, KER, KES, KET, KEY, KFA, KFD, KFE, KFF, KFG, KFH, KFI, KFL, KFN, KFQ, KFR, KFS, KFT, KFY, KGA, KGD, KGE, KGF, KGG, KGH, KGI, KGL, KGN, KGQ, KGR, KGS, KGT, KGY, KHA, KHD, KHE, KHF, KHG, KHH, KHI, KHL, KHN, KHQ, KHR, KHS, KHT, KHY, KIA, KID, KIE, KIF, KIG, KIH, KII, KIL, KIN, KIQ, KIR, KIS, KIT, KIY, KLA, KLD, KLE, KLF, KLG, KLH, KLI, KLL, KLN, KLQ, KLR, KLS, KLT, KLY, KNA, KND, KNE, KNF, KNG, KNH, KNI, KNL, KNN, KNQ, KNR, KNS, KNT, KNY, KPA, KPD, KPE, KPF, KPG, KPH, KPI, KPL, KPN, KPQ, KPR, KPS, KPT, KPY, KQA, KQD, KQE, KQF, KQG, KQH, KQI, KQL, KQN, KQQ, KQR, KQS, KQT, KQY, KRA, KRD, KRE, KRF, KRG, KRH, KRI, KRL, KRN, KRQ, KRR, KRS, KRT, KRY, KSA, KSD, KSE, KSF, KSG, KSH, KSI, KSL, KSN, KSQ, KSR, KSS, KST, KSY, KTA, KTD, KTE, KTF, KTG, KTH, KTI, KTL, KTN, KTQ, KTR, KTS, KTT, KTY, KYA, KYD, KYE, KYF, KYG, KYH, KYI, KYL, KYN, KYQ, KYR, KYS, KYT, KYY, SEQ ID NOs 75 to 24014, KGSH (SEQ ID NO:24049), GKGSH (SEQ ID NO:24050), GKGSKK (SEQ ID NO:24045), GKKPGKK (SEQ ID NO:24046), GKGPSK (SEQ ID NO:24044), GKPSHKP (SEQ ID NO:24043), and GSHKGSHK (SEQ ID NO:24042); and
[0616] wherein the B-chain comprises a sequence selected from SEQ ID NOs 2 and 34 to 74, 24047, and 24048, and is optionally appended at the N-terminus and/or at the C-terminus by at least one selected from KA, KD, KE, KF, KG, KH, KI, KL, KN, KP, KQ, KR, KS, KT, KY, KAA, KAD, KAE, KAF, KAG, KAH, KAI, KAL, KAN, KAQ, KAR, KAS, KAT, KAY, KDA, KDD, KDE, KDF, KDG, KDH, KDI, KDL, KDN, KDQ, KDR, KDS, KDT, KDY, KEA, KED, KEE, KEF, KEG, KEH, KEI, KEL, KEN, KEQ, KER, KES, KET, KEY, KFA, KFD, KFE, KFF, KFG, KFH, KFI, KFL, KFN, KFQ, KFR, KFS, KFT, KFY, KGA, KGD, KGE, KGF, KGG, KGH, KGI, KGL, KGN, KGQ, KGR, KGS, KGT, KGY, KHA, KHD, KHE, KHF, KHG, KHH, KHI, KHL, KHN, KHQ, KHR, KHS, KHT, KHY, KIA, KID, KIE, KIF, KIG, KIH, KII, KIL, KIN, KIQ, KIR, KIS, KIT, KIY, KLA, KLD, KLE, KLF, KLG, KLH, KLI, KLL, KLN, KLQ, KLR, KLS, KLT, KLY, KNA, KND, KNE, KNF, KNG, KNH, KNI, KNL, KNN, KNQ, KNR, KNS, KNT, KNY, KPA, KPD, KPE, KPF, KPG, KPH, KPI, KPL, KPN, KPQ, KPR, KPS, KPT, KPY, KQA, KQD, KQE, KQF, KQG, KQH, KQI, KQL, KQN, KQQ, KQR, KQS, KQT, KQY, KRA, KRD, KRE, KRF, KRG, KRH, KRI, KRL, KRN, KRQ, KRR, KRS, KRT, KRY, KSA, KSD, KSE, KSF, KSG, KSH, KSI, KSL, KSN, KSQ, KSR, KSS, KST, KSY, KTA, KTD, KTE, KTF, KTG, KTH, KTI, KTL, KTN, KTQ, KTR, KTS, KTT, KTY, KYA, KYD, KYE, KYF, KYG, KYH, KYI, KYL, KYN, KYQ, KYR, KYS, KYT, KYY, SEQ ID NOs 75 to 24014, KGSH (SEQ ID NO:24049), GKGSH (SEQ ID NO:24050), GKGSKK (SEQ ID NO:24045), GKKPGKK (SEQ ID NO:24046), GKGPSK (SEQ ID NO:24044), GKPSHKP (SEQ ID NO:24043), and GSHKGSHK (SEQ ID NO:24042).

[0617] In some embodiments, no more than 4 residues are added or deleted from the A-chain and/or the B-chain of the insulin.

[0618] In some embodiments, a K residue is present at the N-terminus of the A-chain and/or the B-chain, and/or wherein no more than three K residues are present at the N-terminus of the A-chain and/or the B-chain, and/or wherein in (i) the tyrosine at A14 is replaced with glutamic acid, and/or (ii) the tyrosine at B16 is replaced with histidine, and/or (iii) the phenylalanine at B25 is replaced with a histidine, and/or wherein one to three residues selected from residues B20, B21, and B22-B29 of the B-chain, residues A4 or A8 of the A-chain, and residues of an optionally extended polypeptide, are lysine residues, and/or wherein only one K residue is present within 10 residues of the N-terminus of B-chain.

[0619] In some embodiments, X1 comprises an insulin and/or insulin analog as disclosed herein.

[0620] In some embodiments, X1 comprises an insulin and/or insulin analog as disclosed herein, and the insulin and/or insulin analog further comprises an optional covalent-spacer.

[0621] In some embodiments, an amino group of one or more side chain(s) of one to four lysine residues of insulin is each independently covalently conjugated as described by Formula I.

[0622] In some embodiments, the insulin comprises at least two amines that are covalently conjugated as described by Formula I, wherein one amine is the N-terminus amino group of the B-chain of insulin, and the other amine(s) are the side chain amine of a lysine that is 0 to 5 residues away from residue B22 of the B-chain of insulin, and/or the side chain amine of a lysine that is 1 to 5 residues away from residue A21 of the A-chain of insulin.

[0623] In some embodiments, an amino group at the N-terminus of the B-chain of insulin is covalently conjugated as described by Formula I, and q′ is optionally 2 or more, and the insulin includes at least one additional covalent conjugation to X1 as independently described by Formula I.

[0624] In some embodiments, the insulin is covalently conjugated as described by Formula I, such as in Examples 1-880, and wherein 1 to 4 residues are optionally added or deleted from the A-chain and/or B-chain of the insulins shown in Examples 1-880.

[0625] In another aspect, the disclosure provides an insulin (e.g., a modified insulin) that may be used as an intermediate for the manufacture of a conjugate described by Formula I.

[0626] In some embodiments, each secondary amine in Formulae FF1-FF224 that is not conjugated to any of B₁, B₂ or B₃, is optionally independently acetylated or alkylated.

[0627] In some embodiments, the N-terminus of the A-chain and/or the N-terminus of the B-chain of insulin are additionally each independently covalently conjugated to at least two aromatic boron-containing groups, and/or wherein the C-terminus of the B-chain is further extended with a polypeptide of up to 20 residues, or the C-terminus of the A-chain is further extended with a polypeptide of up to 40 residues, each polypeptide independently comprising at least one lysine residue in which the amino group of the lysine side chain is covalently conjugated as described by Formula I.

[0628] In some embodiments, X1 is insulin having a sequence comprising one selected from: a lysine at residue B21 of the B-chain and an arginine at residue B29 of the B-chain; a lysine at residue B21 of the B-chain; and a lysine at residue B29 of the B-chain; wherein an amino group of at least one lysine of the sequence is covalently conjugated as described by Formula I.

[0629] In some embodiments, X1 is insulin having a sequence comprising: a lysine at residue B21 of the B-chain; and at least one lysine at the N-terminus of the B-chain; wherein an amino group of at least one lysine of the sequence is covalently conjugated as described by Formula I.

[0630] In some embodiments, the C-terminus of Z1a is conjugated through an amide linkage to a Z1b, and the Z1b is conjugated to the N-terminus of the B-chain of insulin through an amine linkage, and wherein the insulin is optionally further conjugated as described by Formula I.

[0631] In some embodiments, the compound comprises at least one Z1a comprising at least three amino acid residues having a side chain; the side chain of two residues of Z1a are conjugated together through a covalent bond included in at least one selected from a triazole linkage, an amide linkage, a disulfide linkage, a thioether linkage, a thiolene linkage, and an amine linkage; and the two conjugated residues are at least one residue apart.

[0632] In some embodiments, the N-terminal amine of a Z1a is covalently conjugated to a Z1c.

[0633] In some embodiments, the compound comprises at least one Z1a comprising one or more amino acids selected from lysine, diaminopropionic acid, glycine, diaminobutyric acid, serine, histidine, and ornithine, and at least one or more of the side chains of the one or more amino acids, is covalently conjugated as described by Formula I.

[0634] In some embodiments, the compound comprises at least one Z1a comprising one or more glutamic or aspartic acid residues, and optionally other naturally occurring amino acids, and at least one lysine residue that is covalently conjugated as described by Formula I.

[0635] In some embodiments, the compound comprises at least one Z1a comprising at least one lysine residue that is covalently conjugated as described by Formula I, wherein the majority of the residues are negatively charged residues.

[0636] In some embodiments, the insulin is covalently conjugated as described by Formula I, and Z1b is absent and the C-terminus of Z1a is directly conjugated to the N-terminus of the B-chain of insulin through a peptide bond.

[0637] In some embodiments, the insulin is covalently conjugated as described by Formula I,
[0638] n′=0 and the C-terminus of Z1a is directly conjugated to the N-terminus of the B-chain of insulin through a peptide bond; and Z1a comprises at least one amino acid from each of groups M1 and M2 such that no two adjacent residues are from the same group and Z1a contains at least one lysine that is covalently conjugated as described by Formula I, wherein: (i) group M1 comprises lysine and alanine and group M2 comprises glycine, glutamic acid, serine, threonine, alanine and proline; or (ii) group M1 consists of lysine and alanine; and group M2 consists of glycine, glutamic acid, serine, threonine, alanine and proline. 19. In some embodiments, the insulin is covalently conjugated as described by Formula I,
[0639] n′=0 and the C-terminus of Z1a is directly conjugated to the N-terminus of the B-chain of insulin through a peptide bond;
[0640] Z1a comprises at least one amino acid selected from K, P, E, G, S, T, A, and R, such that the sequence comprises at least one lysine, at least one proline, and at least one amino acid selected from H, R, A and T; and
[0641] the amino group of least one lysine side chain in Z1a is covalently conjugated as described by Formula I.

[0642] In some embodiments, the insulin is covalently conjugated as described by Formula I, n′=0 and the C-terminus of Z1a is directly conjugated to the N-terminus of the B-chain of Insulin through a peptide bond; and Z1a comprises at least one amino acid selected from the alanine, glycine, aspartic acid, threonine, histidine, methionine, cysteine, isoleucine, leucine, valine and glutamine; and at least one lysine having a side chain amino group that is covalently conjugated as described by Formula I; and the rest of the amino acids in Z1a are each independently selected from the twenty naturally occurring amino acids.

[0643] In some embodiments, the insulin is covalently conjugated as described by Formula I, n′=0 and the C-terminus of Z1a is directly conjugated to the N-terminus of the B-chain of Insulin through a peptide bond; Z1a has a sequence selected from: KPA, KPH, GKPA, GKPS, KP, GKPSG, and GKPGS; and Z1a comprises at least one lysine having a side chain amino group that is covalently conjugated as described by Formula I.

[0644] In some embodiments, the insulin is covalently conjugated as described by Formula I, n′=0 and the C-terminus of Z1a is directly conjugated to the N-terminus of the B-chain of Insulin through a peptide bond; Z1a comprises two or more copies of a sequence selected from: EGE, SGS, GSG, KP, GEG, E, GG, S, T, A, and R, such that no two adjacent copies are the same; Z1a optionally contains one or more of H, A, N and R; and the amino group of least one lysine side chain in Z1a is covalently conjugated as described by Formula I.

[0645] In some embodiments, the insulin is covalently conjugated as described by Formula I, n′=0 and the C-terminus of Z1a is directly conjugated to the N-terminus of the B-chain of Insulin through a peptide bond; Z1a comprises one or more amino acids selected from K, P, E, G, S, T, A, and R, such the sequence comprises at least one lysine, at least one proline, and at least one amino acid selected from H, R, A and T; and the amino group of least one lysine side chain in Z1a is covalently conjugated as described by Formula I.

[0646] In some embodiments, the insulin is covalently conjugated as described by Formula I, n′=0 and the C-terminus of Z1a is directly conjugated to the N-terminus of the B-chain of Insulin through a peptide bond; and at least one copy of KP is comprised in the polypeptide sequence of Z1a or insulin, wherein the amino group of the lysine side chain in KP is covalently conjugated as described by Formula I.

[0647] In some embodiments, the insulin is covalently conjugated as described by Formula I, n′=0 and the side chains of two residues of Z1a are conjugated via a covalent bond selected from a triazole, an amide bond, a disulfide bond, a thioether, a thiolene, and an amine; the two conjugated residues are separated by at least one amino acid; and the amino group of least one lysine side chain in Z1a is covalently conjugated as described by Formula I.

[0648] In some embodiments, the insulin is covalently conjugated as described by Formula I, n′=0 and the C-terminus of Z1a is directly conjugated to the N-terminus of the B-chain of insulin through a peptide bond; Z1a is a polypeptide selected from the a polypeptide from the sequence of human insulin, a polypeptide from the sequence of human glucagon, a polypeptide from the sequence of human C-peptide, a polypeptide from the sequence of human GLP-1, a polypeptide from the sequence of human GIP, a polypeptide from the sequence of human Extendin, and a human polypeptide hormone, and wherein the polypeptide comprises at least one lysine or Z1a contains at least one copy of dipeptide KP, and wherein the amino group of at least one lysine side chain in Z1a is covalently conjugated as described by Formula I.

[0649] In some embodiments, at least one lysine residue, an inserted cysteine residue, or a residue that has been mutated to cysteine is covalently conjugated to a structure independently selected from Formulae F411-F416:

[chemical structure]

and
[0650] wherein in Formulae F411-F416, R represents an attachment point to the amine group of the lysine side chain, or the thiol group of the cysteine side chain; n is an integer in the range of 1 to 14, m is an integer between 1 and 12, o is an integer between 1 and 6, p is an integer between 1 and 12; and Z represents one of —(C=O)—OH, —NH₂, —CH₃, a cholesterol, 7-OH cholesterol, 7,25-dihydroxycholesterol, cholic acid, chenodeoxycholic acid, lithocholic acid, deoxycholic acid, glycocholic acid, glycodeoxycholic acid, glycolithocholic acid, glycochenodeoxycholic acid, α-tocopherol, β-tocopherol, γ-tocopherol, α-tocopherol, utocotrienol, β-tocotrienol, γ-tocotrienol, or δ-tocotrienol.

[0651] In some embodiments, the residue at position B29 of the B-chain of Insulin is a lysine covalently conjugated through an amide bond to the side chain of an L- or D-glutamic acid, and wherein the L- or D-glutamic acid is covalently conjugated through an amide bond to one of acid selected from hexanoic acid, myristic acid, octanoic acid, nonanoic acid, decanoic acid, lauric acid, stearic acid, and palmitic acid.

[0652] In some embodiments, the insulin is covalently conjugated as described by Formula I, Z1a comprises a polypeptide with the sequence (XA₁X)ₘ, wherein: A₁ is an L- or D-amino acid; m is an integer in the range of 1 to 4; and each X is K or KP; and the epsilon amine group of at least one lysine side chain in Z1a is further covalently conjugated as described by Formula I.

[0653] In some embodiments, the insulin is covalently conjugated as described by Formula I, Z1a comprises a polypeptide with the sequence (XA₁A₂X)ₘ(SEQ ID NO:24021), wherein: A₁ and A₂ are each independently an L- or D-amino acid; m is an integer in the range of 1 to 4; each X is K or KP; and the epsilon amine group of at least one lysine side chain in Z1a is further covalently conjugated as described by Formula I.

[0654] In some embodiments, the insulin is covalently conjugated as described by Formula I, Z1a comprises a polypeptide with the sequence (XA₁A₂A₃X)ₘ(SEQ ID NO:24022), wherein: A₁, A₂, and A₃ are each independently an L- or D-amino acid; m is an integer in the range of 1 to 4; each X is K or KP; and the epsilon amine group of at least one lysine side chain in Z1a is covalently conjugated as described by Formula I.

[0655] In some embodiments, the insulin is covalently conjugated as described by Formula I, Z1a comprises a polypeptide with a sequence selected from (XA1X)m(GGGGS)n (SEQ ID NO:24023), (XA1A2X)m (GGGGS)n (SEQ ID NO:24024), (XA1A2A3X)m(GGGGS)n (SEQ ID NO:24025), (XA1X)m(GGGGS)n (XA2X)o (SEQ ID NO:24026), and XA1A2X)m(GGGGS)n (XA3A4X)o (SEQ ID NO:24027), wherein: A₁, A₂, A₃, and A₄ are each independently an L- or D-amino acid; m is an integer in the range of 1 to 4; n is an integer in the range of 1 to 4; o is an integer in the range of 1 to 4; each X is K or KP; and the epsilon amine group of each lysine side chain of at least one lysine side chain in Z1a is further covalently conjugated as described by Formula I.

[0656] In some embodiments, the insulin is covalently conjugated as described by Formula I, Z1a comprises a polypeptide with the sequence (GX)ₘ, wherein: X is KV; m is an integer in the range of 1 to 4, and the epsilon amine group of at least one lysine side chain in Z1a is further covalently conjugated as described by Formula I.

[0657] In some embodiments, the insulin is covalently conjugated as described by Formula I, Z1a comprises a polypeptide with a sequence selected from: GXA1KGEA2XT)m(GGSGSSS)n (GXGXA3GSSSGSSSXT)o (SEQ ID NO:24028), (GXA1ESA2LYL)m (SEQ ID NO:24029), (TXEX)m(GPGS)n (SEQ ID NO:24030), (GXESA1VA)m (KA2K)n (SEQ ID NO:24031), (GXEA1A2)m(GGS)n (TYA3XXT)o (SEQ ID NO:24032), and (TXAXYT)m(TSSS)n (SEQ ID NO:24033), wherein: each X is KV or KP; A₁, A₂, A₃ are each independently an L- or D-amino acid; m is an integer in the range of 1 to 4; n is an integer in the range of 1 to 4; and o is an integer in the range of 1 to 4; and the epsilon amine group of at least one lysine side chain in Z1a is further covalently conjugated as described by Formula I.

[0658] In some embodiments, the insulin is covalently conjugated as described by Formula I, Z1a comprises a polypeptide with a sequence selected from (TKPYA1KEVETA2GSGS)m (GGGGS)n (SEQ ID NO:24034), (YTPLEA1KPYSTSYKPYSEA1L)m(GKPTSLEA2FLVEA2LYTKP)n (SEQ ID NO:24035), and (GKEALYLTPLESALYKP)m(TKPLEALYLKPEILSLKPESLA)n(GKPGSSSKPDTSSSGTP KTAAGS)o (SEQ ID NO:24036), wherein: A₁ and A₂ are each independently an L- or D-amino acid; m is an integer in the range of 1 to 4; n is an integer in the range of 1 to 4; and the epsilon amine group of at least one lysine side chain in Z1a is further covalently conjugated as described by Formula I.

[0659] In some embodiments, the compound is conjugated either directly, or via an optional covalent-spacer, to a drug molecule, an imaging agent, a contrast agent, a radioactive isotope, a radiotherapy agent, or a molecule that engages immune cells in the body.

[0660] In some embodiments, X1 is human glucagon or an analogue of human glucagon, and optionally covalently conjugated to one or more diol- or sugar-containing molecules, or X1 is an analogue of a human peptide hormone that is modified so that it binds to its cognate receptor but has diminished or null ability to activate the receptor in the body, or X1 is an analogue of a human peptide hormone that is modified so that it selectively binds or activates a subset of its cognate receptors or subsets of receptors of human polypeptide hormones.

[0661] In some embodiments, the aromatic boron-containing groups are modified to be MIDA protected, pinacol protected, or in an ester form. In some embodiments, the aromatic boron-containing group is MIDA protected or pinacol protected.

[0662] In some embodiments, the modified aromatic boron-containing groups are used as intermediates for the synthesis of a conjugate of Formula I.

[0663] In some embodiments, X1 comprises: (i) a human polypeptide hormone or an analogue of a human polypeptide hormone, wherein the covalent linkage to X1 is to an amine or via an optional covalent-spacer to an amine in X1; (ii) an amine configured to be covalently conjugated via an optional covalent-spacer to a human polypeptide hormone or an analogue of a human polypeptide hormone, or (iii) NH₂, and wherein the amine in X1 is covalently conjugated twice as described by Formula I, wherein the first covalent conjugation is through an amine bond and the second covalent conjugation is through an amide bond, and wherein each covalent conjugation is the same or different.

[0664] In some embodiments, residue B21 of the B-chain of Insulin is K, residue B22 of the B-chain of Insulin is P, and residue B29 of the B-chain of Insulin is R; and the N-terminus of the Insulin B-chain is covalently conjugated as described by Formula I to the C-terminus of Z1a, wherein: n′=0; Z1a has the sequence GKPGHKP; and one Z1c is attached to each lysine side chain in Z1a, wherein each Z1c is independently represented by Formula FF12, and each of B1 and B2 are represented by Formula F2, wherein one R1 at position 5′ is the covalent amide bond to Formula FF12, and the amino group of the lysine at B21 (residue 21 of the B-chain of Insulin) is covalently conjugated as described by Formula I, wherein n′=0; m′=0; and Z1c is described by Formula FF12, wherein each of B1 and B2 are represented by formula F2, and wherein one R1 at position 5′ is the covalent amide bond to Formula FF12.

[0665] In at least one embodiment, the present disclosure is directed to an insulin analog. In some embodiments, the insulin analog is desB30 human insulin; wherein the N-terminus of the Insulin B-chain is covalently conjugated as described by Formula I to the C-terminus of Z1a, wherein: n′=0; Z1a has the sequence KPGSEHESA, and one Z1c is attached to each lysine side chain in Z1a, wherein each Z1c is described by Formula FF1, and each of B1 and B2 are described by Formula F1, wherein one R1 at position 3′ is the covalent amide bond to Formula FF1 and wherein one R1 at position 5′ is F, and wherein the amino group of the lysine at B29 (residue 29 of the B-chain of Insulin) is covalently conjugated as described by Formula I, wherein n′=0; m′=0; and Z1c is described by Formula FF1, and each of B1 and B2 are described by Formula F1, wherein one R1 at position 3′ is the covalent amide bond to Formula FF1 and one R1 at position 5′ is F.

[0666] In some embodiments, the A- and/or B-chain sequence of the insulin is appended at the N-terminus or C-terminus by KX′K, KX′, or X′K wherein X′ represents a continuous sequence of 2, 3, 4, or 5 residues selected from within wild-type A-chain (SEQ ID NO:1) and wild-type B-chain (SEQ ID NO:2). In some embodiments, each K residue is optionally and independently covalently conjugated as described by Formula I. In some embodiments, X′ is a polypeptide of up to 30 residues with amino acids independently selected from: K, G, S, E, H, E, N, Q, D, A, P, R and C and each K residue is optionally and independently covalently conjugated as described by Formula I.

[0667] In some embodiments, the N-terminus of the A-chain and/or B-chain are optionally and independently covalently conjugated as described by Formula I.

[0668] In some embodiments, each K residue when present in insulin (insulin analog) is optionally and independently covalently conjugated as described by Formula I, wherein Z1c is any one of formulae FF1-FF224 and the B1 and B2 are each independently selected from F1 and F2.

[0669] In some embodiments, each K residue when present in insulin is optionally and independently covalently conjugated as described by Formula I, wherein Z1c is any one of formulae:
[0670] Formulae FF1-F22 and the B1 and B2 are each independently selected from F1 and F2;
[0671] Formulae FF23-FF48 and the B1 and B2 are each independently selected from F1 and F2;
[0672] Formulae FF49-FF88 and the B1 and B2 are each independently selected from F1 and F2;
[0673] Formulae FF89-FF112 and the B1 and B2 are each independently selected from F1 and F2;
[0674] Formulae FF113-FF136 and the B1 and B2 are each independently selected from F1 and F2;
[0675] Formulae FF137-FF160 and the B1 and B2 are each independently selected from F1 and F2;
[0676] Formulae FF160-FF166 and the B1 and B2 are each independently selected from F1 and F2; or
[0677] Formulae FF167-FF224 and the B1 and B2 are each independently selected from F1 and F2.

[0678] In some embodiments, Z1b is optionally selected from Formula IIa-Formula IIi; and/or optionally selected from Formula IIIa-Formula IIIi.

[0679] In at least some embodiments, the insulin does not comprise Z1a and/or Z1b. In some embodiments, Z1a is not present. In some embodiments, Z1b is not present. In at least some embodiments, Z1a and/or Z1b are not present.

[0680] In some embodiments, each K residue when present in insulin is optionally and independently covalently conjugated as described by Formula I, and wherein Z1c is any one of formulae FF1-FF224 and the B1 and B2 are each independently selected from F3 and F4.

[0681] In some embodiments, each K residue when present in insulin is optionally and independently covalently conjugated as described by Formula I, wherein Z1c is any one of formulae:
[0682] Formulae FF1-F22 and the B1 and B2 are each independently selected from F3 and F4;
[0683] Formulae FF23-FF48 and the B1 and B2 are each independently selected from F3 and F4;
[0684] Formulae FF49-FF88 and the B1 and B2 are each independently selected from F3 and F4;
[0685] Formulae FF89-FF112 and the B1 and B2 are each independently selected from F3 and F4;
[0686] Formulae FF113-FF136 and the B1 and B2 are each independently selected from F3 and F4;
[0687] Formulae FF137-FF160 and the B1 and B2 are each independently selected from F3 and F4;
[0688] Formulae FF160-FF166 and the B1 and B2 are each independently selected from F3 and F4; or
[0689] Formulae FF167-FF224 and the B1 and B2 are each independently selected from F3 and F4.

[0690] In some embodiments, Z1b is optionally selected from Formula IIa-Formula IIi and Formula IIIa-Formula IIIi.

[0691] In some embodiments, Z1a and/or Z1b are not present.

[0692] In some embodiments, each K residue is optionally and independently covalently conjugated as described by Formula I, wherein Z1c is any one of Formulae FF1-F224 and the B1 and B2 are each independently selected from F5, F6, F7, and F8.

[0693] In some embodiments, each K residue when present in insulin is optionally and independently covalently conjugated as described by Formula I, wherein Z1c is any one of formulae:
[0694] Formulae FF1-F22 and the B1 and B2 are each independently selected from F5, F6, F7, and F8;
[0695] Formulae FF23-FF48 and the B1 and B2 are each independently selected from F5, F6, F7, and F8;
[0696] Formulae FF49-FF88 and the B1 and B2 are each independently selected from F5, F6, F7, and F8;
[0697] Formulae FF89-FF112 and the B1 and B2 are each independently selected from F5, F6, F7, and F8;
[0698] Formulae FF113-FF136 and the B1 and B2 are each independently selected from F5, F6, F7, and F8;
[0699] Formulae FF137-FF160 and the B1 and B2 are each independently selected from F5, F6, F7, and F8;
[0700] Formulae FF160-FF166 and the B1 and B2 are each independently selected from F5, F6, F7, and F8; or
[0701] Formulae FF167-FF224 and the B1 and B2 are each independently selected from F5, F6, F7, and F8.

[0702] In some embodiments, Z1b is optionally selected from Formula IIa-Formula IIi and Formula IIIa-Formula IIIi.

[0703] In some embodiments, Z1a and/or Z1b are not present.

[0704] In some embodiments, each K residue when present in insulin is optionally and independently covalently conjugated as described by Formula I, wherein Z1c is any one of formulae FF1-F224and the B1 and B2 are each independently selected from F9 and F10.

[0705] In some embodiments, each K residue when present in insulin is optionally and independently covalently conjugated as described by Formula I, wherein Z1c is any one of formulae:
[0706] Formulae FF1-F22 and the B1 and B2 are each independently selected from F9 and F10;
[0707] Formulae FF23-FF48 and the B1 and B2 are each independently selected from F9 and F10;
[0708] Formulae FF49-FF88 and the B1 and B2 are each independently selected from F9 and F10;
[0709] Formulae FF89-FF112 and the B1 and B2 are each independently selected from F9 and F10;
[0710] Formulae FF113-FF136 and the B1 and B2 are each independently selected from F9 and F10;
[0711] Formulae FF137-FF166 and the B1 and B2 are each independently selected from F9 and F10; or
[0712] Formulae FF167-FF224 and the B1 and B2 are each independently selected from F9 and F10.

[0713] In some embodiments, Z1b is not present in insulin (i.e., insulin analog) and wherein Z1a is a polypeptide that is covalently linked by a peptide bond to the N-terminus of the B-chain of insulin and/or Z1a is a polypeptide that is covalently linked by a peptide bond to the N-terminus of the B-chain of insulin C-terminus of A-chain of insulin.

[0714] In some embodiments, Z1b may be present in insulin. If present in insulin, Z1b is optionally selected from Formula IIa-Formula IIi and Formula IIIa-Formula IIIi.

[0715] In some embodiments, Z1b is not present in insulin. In some embodiments, Z1a is not present. In at least some embodiments, Z1b and/or Z1a are not present.

### Methods of Preparation

[0716] In at least one embodiment, the present disclosure provides a method to prepare a compound comprising an aromatic boron-containing compound and/or an aromatic boron-containing group (e.g., Z1c, Formula I) or a pharmaceutical preparation comprising one or more compounds of the present disclosure.

[0717] In at least one embodiment, the disclosure provides a method for preparing rotationally constrained tether boron conjugates that contain scaffolds (Z1c) that are rotationally hindered by disfavored steric interactions (e.g. gauche vs anti interactions of substituents), hindered rotation due to bond hybridization (e.g., cis- vs trans-amide rotations), or through rigid covalent bonds (e.g., (E) vs (Z) configurations for alkene moieties). For example, formulae FF50-FF62, FF116, and FF121-134 contain alkyl functionalities geminal (e.g., attached to the same atom) to the amine groups that are covalently conjugated to the boronic acid functionalized moieties. As another example, Formulae FF50-FF62, FF116, and FF121-134 contain geminal alkyl substituents which may limit the accessible dihedral angles that the boron conjugated amines adopt, influencing adopted dihedral angles and placing the boronic functionalized groups closer together and allowing for increased binding of the conjugates to target molecules such as proteins or sugars.

### Methods of Treatment

[0718] In at least one embodiment, the disclosure provides a method of treating a subject suffering from, or susceptible to, a disease that is beneficially treated by a compound disclosed herein or a pharmaceutical preparation comprising one or more of the compounds disclosed herein. In some embodiments, the method comprises the step of administering to a subject in need thereof an effective amount of a pharmaceutical preparation/composition of the present disclosure. In at least one embodiment, the compound(s) and/or pharmaceutical preparations of the present disclosure may be for use in (or in the manufacture of medicaments for) the treatment or prevention of disorders, including hyperglycemia, type 2 diabetes, impaired glucose tolerance, type 1 diabetes, obesity, metabolic syndrome X, or dyslipidemia, diabetes during pregnancy, pre-diabetes, Alzheimer's disease, MODY 1, MODY 2 or MODY 3 diabetes, mood disorders, and psychiatric disorders. In at least one embodiment, a therapeutically-effective amount of a compound and/or pharmaceutical preparation of the present disclosure is administered to a subject suffering from diabetes.

[0719] The following examples and experimental data are provided for illustrative purposes only, and do not limit the scope of the embodiments of the present disclosure.

[0720] The following abbreviations have the definitions set forth below:

| Abbreviation | Full Name |
|---|---|
| Acm | s-Acetamidomethyl group |
| ACN | Acetonitrile |
| ARS | Alizarin Red S |
| Boc | tert-Butyloxycarbonyl |
| DCM | Dichloromethane |
| Dde | 1-(4,4-dimethyl-2,6-dioxocyclohex-1-ylidene)ethyl |
| DIPEA, DIEA | N,N-Diisopropylethylamine |
| DMF | Dimethylformamide |
| DMSO | Dimethyl Sulfoxide |
| DTDP | 2,2,-Dithiopyridine |
| EDC | 3-(Ethyliminomethyleneamino)-N,N-dimethylpropan-1- |
| | amine |
| Fmoc | Fluorenylmethyloxycarbonyl Chloride |
| GLP-1 | Glucagon-Like Peptide 1 |
| HATU | Hexafluorophosphate Azabenzotriazole Tetramethyl |
| | Uronium |
| HCl | Hydrochloric Acid |
| IGF1 | Insulin-like Growth Factor 1 |
| LC-MS | Liquid Chromatography-Mass Spectrometry |
| MeOH | Methanol |
| MIDA | N-methyliminodiacetic acid |
| MODY | Maturity Onset Diabetes of the Young |
| NHS | N-Hydroxysuccinimide |
| Oxyma | Ethyl cyanohydroxyiminoacetate |
| RAM | Rink Amide Matrix |
| PEG | Polyethylene Glycol |
| SDS | Sodium Dodecyl Sulfate |
| tBu | tert-Butyl |
| TFA | Trifluoroacetic Acid |

### EXAMPLES

### A. Preparation of Aromatic Boron-Containing Compounds.

[0721] The disclosed compounds can be prepared according to the following schemes. The following schemes represent the general methods used in preparing these compounds. However, the synthesis of these compounds is not limited to these representative methods, as they can also be prepared through various other methods by those skilled in the art of synthetic chemistry.

### Method 1: Synthesis of Diboronates DS01-DS48:

[0722] Chlorotrityl resin (300 mg, 0.45 mmol) was swelled in dry DCM (5 mL) for 30 mins. Solvent was removed with nitrogen and a solution of bromo acetic acid (0.139 g, 1M, 1 mL) in DCM with DIPEA (1M, 0.13 g 1 mL) was added immediately and gently mixed for 1 hr. The mixture was washed with DCM and unreacted sites were capped with a solution of 20% MeOH in a solution of DCM and DIEA (1M) and mixed for 1 hr. The resin was washed with DCM (3×5 mL) then DMF (3×5 mL). A solution of FF-diamine linker propane-1,3-diamine (0.37 g, 1M) in DMF (5 mL) was added to the resin and heated at 50° C. for 10 minutes. The resin was washed with DMF (3×5 mL) and a solution of 3-borono-5-nitrobenzoic acid (0.2M, 0.21 mg, 5 mL) in DMF with N, N′-diisopropylcarbodiimide (DIC) (0.126 g, 1M, 1 mL), Oxyma (0.5 M, 0.142 g, 2 mL) in DMF and heated at 50° C. for 30 min. The resin was washed with DMF (3×5 mL) then DCM (3×5 mL). A solution of trifluoroacetic acid with triisopropyl silane and water (95:2.5:2.5, 5 mL) was added to the resin and mixed for 90 minutes. The solution was collected and dried under vacuum, dissolved in DMSO (100 uL) and fractionated by reverse-phase (RP) flash chromatography on a C18 column with a gradient of 20% ACN in water with 0.1% TFA to 60% ACN in water with 0.1% TFA over 10 minutes. Pure fractions were isolated, combined, frozen, and lyophilized to yield N-(3-(3-borono-5-nitrobenzamido)propyl)-N-(3-borono-5-nitrobenzoyl)glycine (DS01) as a white powder (7 mg).

[0723] Similar procedures are followed for the synthesis of aromatic boron-containing groups DS02-DS48.

### Method 2: Synthesis of Symmetric Diboronates With C-Terminus Linker DS49-DS53

[0724] Tentagel-S—NH₂ resin (250 mg, 0.05 mmol) was swelled in DMF (5 mL) for 2 hr. The solution was removed under a stream of nitrogen and a solution of Boc-Gly-HMBA (0.2 mmol) was coupled using 1-[Bis(dimethylamino)methylene]-1H-1,2,3-triazolo[4,5-b]pyridinium 3-oxide hexafluorophosphate (HATU, 76 mg, 0.2 mmol), and DIPEA (70 ul) in DMF (2 mL) was added to the resin and mixed at room temperature for 45 minutes. The resin was washed with DMF (3×5 mL) and DCM (3×5 mL). A solution of 50% trifluoroacetic acid in DCM (5 mL) was added to the resin and mixed for 20 minutes to remove the Boc protecting group. This step was repeated twice. The resin was washed with DCM (3×5 mL) and DMF (3×5 mL) and was treated with a solution of 10% DIEA in DMF (5 mL) for 10 minutes, the cycle was repeated twice, and resin was washed with DMF (3×5 mL). A solution of 1-(((9H-fluoren-9-yl)methoxy)carbonyl)-4-((((9H-fluoren-9-yl)methoxy)carbonyl)amino)pyrrolidine-2-carboxylic acid (0.115 g, 0.2 mmol) with 1-[Bis(dimethylamino)methylene]-1H-1,2,3-triazolo[4,5-b]pyridinium 3-oxide hexafluorophosphate (HATU, 0.2 mmol), and DIPEA (70 ul) in DMF (2 mL) was added to the resin and mixed for 45 minutes. The resin was washed with DMF (3×5 mL) and a solution of 20% piperidine in DMF (5 mL×3) was added to resin and mixed for 5 minutes. The resin was washed with DMF (3×5 mL) and a solution of 1-hydroxy-1,3-dihydrobenzo[c][1,2]oxaborole-6-carboxylic acid (0.078 g, 0.4 mmol) with HATU (0.4 mmol) and DIPEA (140 uL) in DMF (2 mL) was added to the resin and mixed for 45 minutes. The resin was washed with DMF (3×5 mL) then DCM (3×5 mL). A solution of 0.1 M NaOH in 1:5 water:THF was added to the resin and mixed for 90 minutes. The solution was filtered and adjusted the pH-2 using 1.0 M HCl and fractionated by reverse-phase (RP) flash chromatography on a C18 column with a gradient of 20% ACN in water with 0.1% TFA to 60% ACN in water with 0.1% TFA over 10 minutes. Pure fractions were isolated, combined, frozen, and lyophilized to yield ((2S,4S)-1-(1-hydroxy-1,3-dihydrobenzo[c][1,2]oxaborole-6-carbonyl)-4-(1-hydroxy-1,3-dihydrobenzo[c][1,2]oxaborole-6-carboxamido)pyrrolidine-2-carbonyl)glycine (DS49) as a white powder (10 mg).

[0725] Similar procedures are followed for the synthesis of aromatic boron-containing groups DS50-DS53.

Method 3: Synthesis of Diboronates with Reductive Alkylation on Side Chain Amine DS54-DS63

[0726] Rink-amide resin (0.05 mmol, 263 mg) was swelled in DMF (5 mL) for 20 minutes. The solution was removed under a stream of nitrogen and a solution of 20% piperidine in DMF (5 mL) was added to resin and mixed for 5 minutes. The resin was washed with DMF (3×5 mL). A solution of ((S)-2-((((9H-fluoren-9-yl)methoxy)carbonyl)amino)-3-((diphenyl(p-tolyl)methyl)amino) propanoic acid (116 mg, 0.2 mmol) with 1-[Bis(dimethylamino)methylene]-1H-1,2,3-triazolo[4,5-b]pyridinium 3-oxide hexafluorophosphate (HATU, 76 mg, 0.2 mmol), and DIPEA (70 ul) in DMF (2 mL) was added to the resin and mixed at room temperature for 45 minutes. The resin was washed with DMF (3×5 mL) and DCM (3×5 mL). A solution of 0.2% trifluoroacetic acid in DCM (5 mL) was added to the resin and mixed for 10 minutes to remove Mtt protecting group. This step was repeated twice. The resin was washed with DCM (3×5 mL) and DMF (3×5 mL) and was treated with a solution of 10% DIEA in DMF (5 mL) for 10 minutes, the cycle was repeated twice, and resin was washed with DMF (3×5 mL). A solution of benzaldehyde (0.053 g, 0.5 mol) in trimethyl orthoformate (TMOF) (2 mL) was added to the resin and mixed for 1 hr. The solution was filtered, and resin was washed with DMF (3×5 mL) and 10% acetic acid in methanol (2×5 mL). The solution of NaCNBH₃ (10 equivalents) in 10% acetic acid in methanol was added to the resin and mixed for 1 hr, washed with DMF (3×5 mL). The resin was treated with 20% piperidine in DMF (3×5 mL) to deprotect the Fmoc, washed with DMF (3×5 mL) and coupled with 1-hydroxy-1,3-dihydrobenzo[c][1,2]oxaborole-6-carboxylic acid (0.078 g, 0.4 mmol) using 1-[Bis(dimethylamino)methylene]-1H-1,2,3-triazolo[4,5-b]pyridinium 3-oxide hexafluorophosphate (HATU, 152 mg, 0.4 mmol), and DIPEA (140 ul) in DMF (2 mL) for 45 minutes. After coupling reaction, the resin was washed with DMF (3×5 mL) then with DCM (2×5 mL). A solution of trifluoroacetic acid with triisopropyl silane and water (95:2.5:2.5, 5 mL) was added to the resin and mixed for 90 minutes. The solution was collected and dried under vacuum, dissolved in DMSO (100 uL) and fractionated by reverse-phase (RP) flash chromatography on a C18 column with a gradient of 20% ACN in water with 0.1% TFA to 60% ACN in water with 0.1% TFA over 10 minutes. Pure fractions were isolated, combined, frozen, and lyophilized to yield (S)—N-(3-amino-2-(1-hydroxy-1,3-dihydrobenzo[c][1,2]oxaborole-6-carboxamido)-3-oxopropyl)-N-benzyl-1-hydroxy-1,3-dihydrobenzo[c][1,2]oxaborole-6-carboxamide (DS54) as a white powder (7 mg).

[0727] Similar procedures are followed for the synthesis of aromatic boron-containing groups DS55-DS63.

### Method 4: Synthesis of Symmetric Diboronates Based on Amino Acids DS64-DS76, DS109-DS111

[0728] Rink-amide resin (0.05 mmol, 263 mg) was swelled in DMF (5 mL) for 20 minutes. The solution was removed under a stream of nitrogen and a solution of 20% piperidine in DMF (5 mL) was added to resin and mixed for 5 minutes. The resin was washed with DMF (3×5 mL). A solution of 1-(((9H-fluoren-9-yl)methoxy)carbonyl)-4-((((9H-fluoren-9 yl)methoxy) carbonyl) amino) pyrrolidine-2-carboxylic acid (0.115 g, 0.2 mmol) with 1-[Bis(dimethylamino)methylene]-1H-1,2,3-triazolo[4,5-b]pyridinium 3-oxide hexafluorophosphate (HATU, 0.2 mmol), and DIPEA (70 ul) in DMF (2 mL) was added to the resin and mixed at 50° C. for 20 minutes. The resin was washed with DMF (3×5 mL) and a solution of 20% piperidine in DMF (5 mL) was added to the resin and mixed for 5 minutes. The resin was washed with DMF (3×5 mL) and a solution of 1-hydroxy-1,3-dihydrobenzo[c][1,2]oxaborole-6-carboxylic acid (0.078 g, 0.4 mmol) with HATU (0.4 mmol) and DIPEA (140 uL) in DMF (2 mL) was added to the resin and mixed at 50° C. for 30 minutes. The resin was washed with DMF (3×5 mL) then with DCM (3×5 mL). A solution of trifluoroacetic acid with triisopropyl silane and water (95:2.5:2.5, 5 mL) was added to the resin and mixed for 90 minutes. The solution was collected and dried under vacuum, dissolved in DMSO (100 uL) and fractionated by reverse-phase (RP) flash chromatography on a C₁₈ column with a gradient of 20% ACN in water with 0.1% TFA to 60% ACN in water with 0.1% TFA over 10 minutes. Pure fractions were isolated, combined, frozen, and lyophilized to yield (3-((2S,4S)-4-(5-borono-2-(methylsulfonyl)benzamido)-2-carbamoylpyrrolidine-1-carbonyl)-4-(methylsulfonyl)phenyl)boronic acid (DS64) as a white powder (10 mg).

[0729] Similar procedures are followed for the synthesis of aromatic boron-containing groups DS65-DS76. Similar procedure can be followed for the synthesis of diboronate sensors DS109-DS111 noting that the resin used is 2-chlorotrityl resin and not the Amine Rink-amide resin.

### Method 5: Asymmetric Diboronate Synthesis DS77-DS79

[0730] Tentagel-S—NH₂ resin (250 mg, 0.05 mmol) was swelled in DMF (5 mL) for 2 hr. The solution was removed under a stream of nitrogen and a solution of Boc-Gly-HMBA (0.2 mmol) was coupled using 1-[Bis(dimethylamino)methylene]-1H-1,2,3-triazolo[4,5-b]pyridinium 3-oxide hexafluorophosphate (HATU, 76 mg, 0.2 mmol), and DIPEA (70 ul) in DMF (2 mL) was added to the resin and mixed at room temperature for 45 minutes. The resin was washed with DMF (3×5 mL) and DCM (3×5 mL). A solution of 50% trifluoroacetic acid in DCM (5 mL) was added to the resin and mixed for 20 minutes. To remove Boc protecting group. This step was repeated twice. The resin was washed with DCM (3×5 mL) and DMF (3×5 mL) and was treated with a solution of 10% DIEA in DMF (5 mL) for 10 minutes, the cycle was repeated twice, and resin was washed with DMF (3×5 mL). A solution of 1-(((9H-fluoren-9-yl)methoxy)carbonyl)-4-((tert-butoxycarbonyl)amino)pyrrolidine-2-carboxylic acid (0.09 g, 0.2 mmol) with 1-[Bis(dimethylamino)methylene]-1H-1,2,3-triazolo[4,5-b]pyridinium 3-oxide hexafluorophosphate (HATU, 0.2 mmol), and DIPEA (70 ul) in DMF (2 mL) was added to the resin and mixed for 45 minutes. The resin was washed with DMF (3×5 mL) and a solution of 20% piperidine in DMF (5 mL×3) was added to resin and mixed for 5 minutes. The resin was washed with DMF (3×5 mL) and a solution of 1-hydroxy-1,3-dihydrobenzo[c][1,2]oxaborole-6-carboxylic acid (0.039 g, 0.2 mmol) with HATU (0.076 g, 0.2 mmol) and DIPEA (140 uL) in DMF (2 mL) was added to the resin and mixed for 45 minutes. and DCM (3×5 mL). A solution of 50% trifluoroacetic acid in DCM (5 mL) was added to the resin and mixed for 20 minutes, to remove Boc protecting group. This step was repeated twice. The resin was washed with DCM (3×5 mL) and DMF (3×5 mL) and was treated with a solution of 10% DIEA in DMF (5 mL) for 10 minutes, the cycle was repeated twice, and resin was washed with DMF (3×5 mL). A solution of 5-borono-2-nitrobenzoic acid (0.042 g, 0.2 mmol) with HATU (0.076 g, 0.2 mmol) and DIPEA (140 uL) in DMF (2 mL) was added to the resin and mixed for 45 minutes. The resin was washed with DMF (3×5 mL) then DCM (3×5 mL). A solution of 0.1M NaOH in 1:5 water:THF was added to the resin and mixed for 90 minutes. The solution was filtered and adjusted the pH-2 using 1.0 M HCl and fractionated by reverse-phase (RP) flash chromatography on a C18 column with a gradient of 20% ACN in water with 0.1% TFA to 60% ACN in water with 0.1% TFA over 10 minutes. Pure fractions were isolated, combined, frozen, and lyophilized to yield ((2S,4S)-1-(5-borono-2-nitrobenzoyl)-4-(1-hydroxy-1,3-dihydrobenzo[c][1,2]oxaborole-6-carboxamido)pyrrolidine-2-carbonyl)glycine (DS77) as a white powder (8 mg).

[0731] Similar procedures are followed for the synthesis of aromatic boron-containing groups DS78-DS79.

Method 6: Synthesis of Diboronates with Reductive Alkylation on Side Chain DS80-DS109

[0732] Amine Rink-amide resin (0.05 mmol, 263 mg) was swelled in DMF (5 mL) for 20 minutes. The solution was removed under a stream of nitrogen and a solution of 20% piperidine in DMF (5 mL) was added to resin and mixed for 5 minutes. The resin was washed with DMF (3×5 mL). A solution of N⁶-(((9H-fluoren-9-yl)methoxy)carbonyl)-N2-(tert-butoxycarbonyl)lysine (93.6 mg, 0.2 mmol) with 1-[Bis(dimethylamino)methylene]-1H-1,2,3-triazolo[4,5-b]pyridinium 3-oxide hexafluorophosphate (HATU, 76 mg, 0.2 mmol), and DIPEA (70 ul) in DMF (2 mL) was added to the resin and mixed at room temperature for 45 minutes. The resin was washed with DMF (3×5 mL). The Fmoc was removed with 20% piperidine in DMF (2×5 mL) and then washed with additional DMF (3×10 mL) A solution of 4-methyl-3-(4,4,5,5-tetramethyl-1,3,2-dioxaborolan-2-yl)benzaldehyde (123 mg, 0.5 mol) in trimethyl orthoformate (TMOF) (2 mL) was added to the resin and mixed for 1 hr. The solution was filtered, and resin was washed with DMF (3×5 mL) and a solution of NaBH₄ (10 equivalents) in 20% methanol in DMF was added to the resin and mixed for 1 hr, washed with DMF (3×5 mL). The reduced amine was then coupled with 3-nitro-5-(4,4,5,5-tetramethyl-1,3,2-dioxaborolan-2-yl)benzoic acid (117 mg, 0.4 mmol) using 1-[Bis(dimethylamino)methylene]-1H-1,2,3-triazolo[4,5-b]pyridinium 3-oxide hexafluorophosphate (HATU, 152 mg, 0.4 mmol), and DIPEA (140 ul) in DMF (2 mL) for 45 minutes. After coupling reaction, the resin was washed with DMF (3×5 mL) then with DCM (2×5 mL). A solution of trifluoroacetic acid with triisopropyl silane and water (95:2.5:2.5, 5 mL) was added to the resin and mixed for 90 minutes. The solution was collected and dried under vacuum, dissolved in DMSO (100 uL) and fractionated by reverse-phase (RP) flash chromatography on a C₁₈ column with a gradient of 20% ACN in water with 0.1% TFA to 60% ACN in water with 0.1% TFA over 10 minutes. Pure fractions were isolated, combined, frozen, and lyophilized to yield diboronate sensor DS80 as a white powder (10 mg). Similar procedure was followed for the synthesis of diboronate sensors DS81-DS109.

[0733] The chemical structure and IUPAC name of DS1 to DS109 are summarized in Table 1 below.

TABLE 1

| Compd | | | |
|---|---|---|---|
| # | FF | F | Structure/IUPAC Name |
| DS01 | FF10 | F1 | [chemical structure] |
| | | | N-(3-(3-borono-5-nitrobenzamido)propyl)-N-(3-borono-5- |
| | | | nitrobenzoyl)glycine |
| DS02 | FF217 | F1 | [chemical structure] |
| | | | N-(4-((4-(3-borono-5- |
| | | | nitrobenzamido)cyclohexyl)methyl)cyclohexyl)-N-(3-borono-5- |
| | | | nitrobenzoyl)glycine |
| DS03 | FF8 | F1 | [chemical structure] |
| | | | N-(4-((3-borono-5-nitrobenzamido)methyl)benzyl)-N-(3-borono-5- |
| | | | nitrobenzoyl)glycine |
| DS04 | FF14 | F1 | [chemical structure] |
| | | | N-(3-((3-borono-5-nitrobenzamido)methyl)benzyl)-N-(3-borono-5- |
| | | | nitrobenzoyl)glycine |
| DS05 | FF10 | F1 | [chemical structure] |
| | | | N-(4-(3-borono-5-nitrobenzamido)butyl)-N-(3-borono-5- |
| | | | nitrobenzoyl)glycine |
| DS06 | FF10 | F1 | [chemical structure] |
| | | | N-(3-(3-borono-5-fluorobenzamido)propyl)-N-(3-borono-5- |
| | | | fluorobenzoyl)glycine |
| DS07 | FF213 | F1 | [chemical structure] |
| | | | N-(3-(3-borono-5-fluorobenzamido)-2,2-dimethylpropyl)-N-(3- |
| | | | borono-5-fluorobenzoyl)glycine |
| DS08 | FF214 | F1 | [chemical structure] |
| | | | bis(3-(3-borono-5-fluorobenzamido)propyl)glycine |
| DS09 | FF8 | F1 | [chemical structure] |
| | | | N-(4-((3-borono-5-fluorobenzamido)methyl)benzyl)-N-(3-borono- |
| | | | 5-fluorobenzoyl)glycine |
| DS10 | FF14 | F | [chemical structure] |
| | | | N-(3-((3-borono-5-fluorobenzamido)methyl)benzyl)-N-(3-borono- |
| | | | 5-fluorobenzoyl)glycine |
| DS11 | FF1 | F1 | [chemical structure] |
| | | | N-(2-(3-borono-5-fluorobenzamido)cyclohexyl)-N-(3-borono-5- |
| | | | fluorobenzoyl)glycine |
| DS12 | FF10 | F1 | [chemical structure] |
| | | | N-(3-(3-borono-4-fluorobenzamido)propyl)-N-(3-borono-4- |
| | | | fluorobenzoyl)glycine |
| DS13 | FF217 | F1 | [chemical structure] |
| | | | N-(4-((4-(3-borono-4- |
| | | | fluorobenzamido)cyclohexyl)methyl)cyclohexyl)-N-(3-borono-4- |
| | | | fluorobenzoyl)glycine |
| DS14 | FF213 | F1 | [chemical structure] |
| | | | N-(3-(3-borono-4-fluorobenzamido)-2,2-dimethylpropyl)-N-(3- |
| | | | borono-4-fluorobenzoyl)glycine |
| DS15 | FF8 | F1 | [chemical structure] |
| | | | N-(4-((3-borono-4-fluorobenzamido)methyl)benzyl)-N-(3-borono- |
| | | | 4-fluorobenzoyl)glycine |
| DS16 | FF14 | F1 | [chemical structure] |
| | | | N-(3-((3-borono-4-fluorobenzamido)methyl)benzyl)-N-(3-borono- |
| | | | 4-fluorobenzoyl)glycine |
| DS17 | FF1 | F1 | [chemical structure] |
| | | | N-((1S,2R)-2-(3-borono-4-fluorobenzamido)cyclohexyl)-N-(3- |
| | | | borono-4-fluorobenzoyl)glycine |
| DS18 | FF1 | F1 | [chemical structure] |
| | | | N-((1S,2S)-2-(3-borono-4-fluorobenzamido)cyclohexyl)-N-(3- |
| | | | borono-4-fluorobenzoyl)glycine |
| DS19 | FF10 | F1 | [chemical structure] |
| | | | N-(3-(3-borono-5-bromobenzamido)propyl)-N-(3-borono-5- |
| | | | bromobenzoyl)glycine |
| DS20 | FF217 | F1 | [chemical structure] |
| | | | N-(4-((4-(3-borono-5- |
| | | | bromobenzamido)cyclohexyl)methyl)cyclohexyl)-N-(3-borono-5- |
| | | | bromobenzoyl)glycine |
| DS21 | FF214 | F1 | [chemical structure] |
| | | | bis(3-(3-borono-5-bromobenzamido)propyl)glycine |
| DS22 | FF8 | F1 | [chemical structure] |
| | | | N-(4-((3-borono-5-bromobenzamido)methyl)benzyl)-N-(3-borono- |
| | | | 5-bromobenzoyl)glycine |
| DS23 | FF14 | F1 | [chemical structure] |
| | | | N-(3-((3-borono-5-bromobenzamido)methyl)benzyl)-N-(3-borono- |
| | | | 5-bromobenzoyl)glycine |
| DS24 | FF1 | F1 | [chemical structure] |
| | | | N-(2-(3-borono-5-bromobenzamido)cyclohexyl)-N-(3-borono-5- |
| | | | bromobenzoyl)glycine |
| DS25 | FF10 | F1 | [chemical structure] |
| | | | N-(3-(4-borono-3-fluorobenzamido)propyl)-N-(4-borono-3- |
| | | | fluorobenzoyl)glycine |
| DS26 | FF217 | F1 | [chemical structure] |
| | | | N-(4-((4-(4-borono-3- |
| | | | fluorobenzamido)cyclohexyl)methyl)cyclohexyl)-N-(4-borono-3- |
| | | | fluorobenzoyl)glycine |
| DS27 | FF213 | F1 | [chemical structure] |
| | | | N-(3-(4-borono-3-fluorobenzamido)-2,2-dimethylpropyl)-N-(4- |
| | | | borono-3-fluorobenzoyl)glycine |
| DS28 | FF214 | F1 | [chemical structure] |
| | | | bis(3-(4-borono-3-fluorobenzamido)propyl)glycine |
| DS29 | FF8 | F1 | [chemical structure] |
| | | | N-(4-((4-borono-3-fluorobenzamido)methyl)benzyl)-N-(4-borono- |
| | | | 3-fluorobenzoyl)glycine |
| DS30 | FF14 | F1 | [chemical structure] |
| | | | N-(3-((4-borono-3-fluorobenzamido)methyl)benzyl)-N-(4-borono- |
| | | | 3-fluorobenzoyl)glycine |
| DS31 | FF1 | F1 | [chemical structure] |
| | | | N-((1S,2R)-2-(4-borono-3-fluorobenzamido)cyclohexyl)-N-(4- |
| | | | borono-3-fluorobenzoyl)glycine |
| DS32 | FF10 | F2 | [chemical structure] |
| | | | N-(1-hydroxy-1,3-dihydrobenzo[c][1,2]oxaborole-6-carbonyl)-N- |
| | | | (3-(1-hydroxy-1,3-dihydrobenzo[c][1,2]oxaborole-6- |
| | | | carboxamido)propyl)glycine |
| DS33 | FF10 | F2 | [chemical structure] |
| | | | N-(1-hydroxy-1,3-dihydrobenzo[c][1,2]oxaborole-6-carbonyl)-N- |
| | | | (5-(1-hydroxy-1,3-dihydrobenzo[c][1,2]oxaborole-6- |
| | | | carboxamido)pentyl)glycine |
| DS34 | FF213 | F2 | [chemical structure] |
| | | | N-(1-hydroxy-1,3-dihydrobenzo[c][1,2]oxaborole-6-carbonyl)-N- |
| | | | (3-(1-hydroxy-1,3-dihydrobenzo[c][1,2]oxaborole-6- |
| | | | carboxamido)-2,2-dimethylpropyl)glycine |
| DS35 | FF214 | F2 | [chemical structure] |
| | | | bis(3-(1-hydroxy-1,3-dihydrobenzo[c][1,2]oxaborole-6- |
| | | | carboxamido)propyl)glycine |
| DS36 | FF14 | F2 | [chemical structure] |
| | | | N-(1-hydroxy-1,3-dihydrobenzo[c][1,2]oxaborole-6-carbonyl)-N- |
| | | | (3-((1-hydroxy-1,3-dihydrobenzo[c][1,2]oxaborole-6- |
| | | | carboxamido)methyl)benzyl)glycine |
| DS37 | FF1 | F2 | [chemical structure] |
| | | | N-(1-hydroxy-1,3-dihydrobenzo[c][1,2]oxaborole-6-carbonyl)-N- |
| | | | ((1S,2R)-2-(1-hydroxy-1,3-dihydrobenzo[c][1,2]oxaborole-6- |
| | | | carboxamido)cyclohexyl)glycine |
| DS38 | FF10 | F2 | [chemical structure] |
| | | | N-(1-hydroxy-1,3-dihydrobenzo[c][1,2]oxaborole-6-carbonyl)-N- |
| | | | (4-(1-hydroxy-1,3-dihydrobenzo[c][1,2]oxaborole-6- |
| | | | carboxamido)butyl)glycine |
| DS39 | FF1 | F2 | [chemical structure] |
| | | | N-(1-hydroxy-1,3-dihydrobenzo[c][1,2]oxaborole-6-carbonyl)-N- |
| | | | ((1S,2S)-2-(1-hydroxy-1,3-dihydrobenzo[c][1,2]oxaborole-6- |
| | | | carboxamido)cyclohexyl)glycine |
| DS40 | FF15 | F2 | [chemical structure] |
| | | | (R)-N-(1-hydroxy-1,3-dihydrobenzo[c][1,2]oxaborole-6-carbonyl)- |
| | | | N-(2-(1-hydroxy-1,3-dihydrobenzo[c][1,2]oxaborole-6- |
| | | | carboxamido)propyl)glycine |
| DS41 | FF15 | F2 | [chemical structure] |
| | | | (S)-N-(1-hydroxy-1,3-dihydrobenzo[c][1,2]oxaborole-6-carbonyl)- |
| | | | N-(2-(1-hydroxy-1,3-dihydrobenzo[c][1,2]oxaborole-6- |
| | | | carboxamido)propyl)glycine |
| DS42 | FF1 | F2 | [chemical structure] |
| | | | N-(1-hydroxy-1,3-dihydrobenzo[c][1,2]oxaborole-6-carbonyl)-N- |
| | | | (2-(1-hydroxy-1,3-dihydrobenzo[c][1,2]oxaborole-6- |
| | | | carboxamido)cyclohexyl)glycine |
| DS43 | FF10 | F1 | [chemical structure] |
| | | | N-(3-(4-borono-3,5-difluorobenzamido)propyl)-N-(4-borono-3,5- |
| | | | difluorobenzoyl)glycine |
| DS44 | FF10 | F1 | [chemical structure] |
| | | | N-(3-(4-borono-2-fluorobenzamido)propyl)-N-(4-borono-2- |
| | | | fluorobenzoyl)glycine |
| DS45 | FF215 | F2 | [chemical structure] |
| | | | N-(2-(N-ethyl-1-hydroxy-1,3-dihydrobenzo[c][1,2]oxaborole-6- |
| | | | carboxamido)ethyl)-N-(1-hydroxy-1,3- |
| | | | dihydrobenzo[c][1,2]oxaborole-6-carbonyl)glycine |
| DS46 | FF215 | F2 | [chemical structure] |
| | | | N-(1-hydroxy-1,3-dihydrobenzo[c][1,2]oxaborole-6-carbonyl)-N- |
| | | | (2-(1-hydroxy-N-(2-hydroxyethyl)-1,3- |
| | | | dihydrobenzo[c][1,2]oxaborole-6-carboxamido)ethyl)glycine |
| DS47 | FF216 | F2 | [chemical structure] |
| | | | N-(1-hydroxy-1,3-dihydrobenzo[c][1,2]oxaborole-6-carbonyl)-N- |
| | | | (5-(1-hydroxy-1,3-dihydrobenzo[c][1,2]oxaborole-6- |
| | | | carboxamido)hexyl)glycine |
| DS48 | FF217 | F2 | [chemical structure] |
| | | | N-(1-hydroxy-1,3-dihydrobenzo[c][1,2]oxaborole-6-carbonyl)-N- |
| | | | (4-((4-(1-hydroxy-1,3-dihydrobenzo[c][1,2]oxaborole-6- |
| | | | carboxamido)cyclohexyl)methyl)cyclohexyl)glycine |
| DS49 | FF12 | F2 | [chemical structure] |
| | | | ((2S,4S)-1-(1-hydroxy-1,3-dihydrobenzo[c][1,2]oxaborole-6- |
| | | | carbonyl)-4-(1-hydroxy-1,3-dihydrobenzo[c][1,2]oxaborole-6- |
| | | | carboxamido)pyrrolidine-2-carbonyl)glycine |
| DS50 | FF12 | F1 | [chemical structure] |
| | | | ((2S,4S)-4-(3-borono-4-fluorobenzamido)-1-(3-borono-4- |
| | | | fluorobenzoyl)pyrrolidine-2-carbonyl)glycine |
| DS51 | FF12 | F1 | [chemical structure] |
| | | | ((2S,4S)-4-(3-borono-5-nitrobenzamido)-1-(3-borono-5- |
| | | | nitrobenzoyl)pyrrolidine-2-carbonyl)glycine |
| DS52 | FF12 | F1 | [chemical structure] |
| | | | ((2S,4S)-4-(5-borono-2-fluorobenzamido)-1-(5-borono-2- |
| | | | fluorobenzoyl)pyrrolidine-2-carbonyl)glycine |
| DS53 | FF9 | F2 | [chemical structure] |
| | | | (S)-(1,4-bis(1-hydroxy-1,3-dihydrobenzo[c][1,2]oxaborole-6- |
| | | | carbonyl)piperazine-2-carbonyl)glycine |
| DS54 | FF208 | F2 | [chemical structure] |
| | | | (S)-N-(3-amino-2-(1-hydroxy-1,3-dihydrobenzo[c][1,2]oxaborole- |
| | | | 6-carboxamido)-3-oxopropyl)-N-benzyl-1-hydroxy-1,3- |
| | | | dihydrobenzo[c][1,2]oxaborole-6-carboxamide |
| DS55 | FF208 | F2 | [chemical structure] |
| | | | (S)-N-(3-amino-2-(1-hydroxy-1,3-dihydrobenzo[c][1,2]oxaborole- |
| | | | 6-carboxamido)-3-oxopropyl)-1-hydroxy-N-(4- |
| | | | (trifluoromethyl)benzyl)-1,3-dihydrobenzo[c][1,2]oxaborole-6- |
| | | | carboxamide |
| DS56 | FF208 | F2 | [chemical structure] |
| | | | (S)-N-(3-amino-2-(1-hydroxy-1,3-dihydrobenzo[c][1,2]oxaborole- |
| | | | 6-carboxamido)-3-oxopropyl)-N-ethyl-1-hydroxy-1,3- |
| | | | dihydrobenzo[c][1,2]oxaborole-6-carboxamide |
| DS57 | FF208 | F2 | [chemical structure] |
| | | | (S)-N-(3-amino-2-(1-hydroxy-1,3-dihydrobenzo[c][1,2]oxaborole- |
| | | | 6-carboxamido)-3-oxopropyl)-1-hydroxy-N-propyl-1,3- |
| | | | dihydrobenzo[c][1,2]oxaborole-6-carboxamide |
| DS58 | FF208 | F2 | [chemical structure] |
| | | | (S)-N-(3-amino-2-(1-hydroxy-1,3-dihydrobenzo[c][1,2]oxaborole- |
| | | | 6-carboxamido)-3-oxopropyl)-1-hydroxy-N-isobutyl-1,3- |
| | | | dihydrobenzo[c][1,2]oxaborole-6-carboxamide |
| DS59 | FF208 | F2 | [chemical structure] |
| | | | (S)-N-(3-amino-2-(1-hydroxy-1,3-dihydrobenzo[c][1,2]oxaborole- |
| | | | 6-carboxamido)-3-oxopropyl)-1-hydroxy-N-((5-(thiophen-2- |
| | | | yl)pyridin-2-yl)methyl)-1,3-dihydrobenzo[c][1,2]oxaborole-6- |
| | | | carboxamide |
| DS60 | FF208 | F2 | [chemical structure] |
| | | | (S)-N-(3-amino-2-(1-hydroxy-1,3-dihydrobenzo[c][1,2]oxaborole- |
| | | | 6-carboxamido)-3-oxopropyl)-1-hydroxy-N-isopentyl-1,3- |
| | | | dihydrobenzo[c][1,2]oxaborole-6-carboxamide |
| DS61 | FF208 | F2 | [chemical structure] |
| | | | (S)-N-(3-amino-2-(1-hydroxy-1,3-dihydrobenzo[c][1,2]oxaborole- |
| | | | 6-carboxamido)-3-oxopropyl)-1-hydroxy-N-(quinolin-5-ylmethyl)- |
| | | | 1,3-dihydrobenzo[c][1,2]oxaborole-6-carboxamide |
| DS62 | FF208 | F2 | [chemical structure] |
| | | | (S)-N-(3-amino-2-(1-hydroxy-1,3-dihydrobenzo[c][1,2]oxaborole- |
| | | | 6-carboxamido)-3-oxopropyl)-1-hydroxy-N-(2- |
| | | | (trifluoromethoxy)benzyl)-1,3-dihydrobenzo[c][1,2]oxaborole-6- |
| | | | carboxamide |
| DS63 | FF208 | F2 | [chemical structure] |
| | | | (S)-N-(3-amino-2-(1-hydroxy-1,3-dihydrobenzo[c][1,2]oxaborole- |
| | | | 6-carboxamido)-3-oxopropyl)-1-hydroxy-N-(4- |
| | | | (methylsulfonyl)benzyl)-1,3-dihydrobenzo[c][1,2]oxaborole-6- |
| | | | carboxamide |
| DS64 | FF12 | F1 | [chemical structure] |
| | | | (3-((2S,4S)-4-(5-borono-2-(methylsulfonyl)benzamido)-2- |
| | | | carbamoylpyrrolidine-1-carbonyl)-4- |
| | | | (methylsulfonyl)phenyl)boronic acid |
| DS65 | FF12 | F1 | [chemical structure] |
| | | | (4-(((3S,5S)-1-(4-borono-2,6-difluorobenzoyl)-5- |
| | | | carbamoylpyrrolidin-3-yl)carbamoyl)-3,5-difluorophenyl)boronic |
| | | | acid |
| DS66 | FF220 | F2 | [chemical structure] |
| | | | (R,E)-4,5-bis(1-hydroxy-1,3-dihydrobenzo[c][1,2]oxaborole-6- |
| | | | carboxamido)pent-2-enoic acid |
| DS67 | FF12 | F2 | [chemical structure] |
| | | | (2S,4S)-1-(1-hydroxy-4-(trifluoromethyl)-1,3- |
| | | | dihydrobenzo[c][1,2]oxaborole-6-carbonyl)-4-(1-hydroxy-4- |
| | | | (trifluoromethyl)-1,3-dihydrobenzo[c][1,2]oxaborole-6- |
| | | | carboxamido)pyrrolidine-2-carboxamide |
| DS68 | FF116 | F2 | [chemical structure] |
| | | | N,N′-((2S,3S)-1-amino-1-oxobutane-2,3-diyl)bis(1-hydroxy-1,3- |
| | | | dihydrobenzo[c][1,2]oxaborole-6-carboxamide) |
| DS69 | FF115 | F2 | [chemical structure] |
| | | | (R)-3,4-bis(1-hydroxy-1,3-dihydrobenzo[c][1,2]oxaborole-6- |
| | | | carboxamido)butanoic acid |
| DS70 | FF12 | F2 | [chemical structure] |
| | | | 3-((2S,4S)-1-(1-hydroxy-1,3-dihydrobenzo[c][1,2]oxaborole-6- |
| | | | carbonyl)-4-(1-hydroxy-1,3-dihydrobenzo[c][1,2]oxaborole-6- |
| | | | carboxamido)pyrrolidine-2-carboxamido)propanoic acid |
| DS71 | FF115 | F2 | [chemical structure] |
| | | | (S)-3-(1-hydroxy-1,3-dihydrobenzo[c][1,2]oxaborole-5- |
| | | | carboxamido)-4-(1-hydroxy-1,3-dihydrobenzo[c][1,2]oxaborole-6- |
| | | | carboxamido)butanoic acid |
| DS72 | FF114 | F2 | [chemical structure] |
| | | | (R)-4-(1-hydroxy-1,3-dihydrobenzo[c][1,2]oxaborole-5- |
| | | | carboxamido)-5-(1-hydroxy-1,3-dihydrobenzo[c][1,2]oxaborole-6- |
| | | | carboxamido)pentanoic acid |
| DS73 | FF12 | F2 | [chemical structure] |
| | | | (2S,4R)-1-(1-hydroxy-1,3-dihydrobenzo[c][1,2]oxaborole-6- |
| | | | carbonyl)-4-(1-hydroxy-1,3-dihydrobenzo[c][1,2]oxaborole-6- |
| | | | carboxamido)pyrrolidine-2-carboxylic acid |
| DS74 | FF12 | F2 | [chemical structure] |
| | | | (2S,4R)-1-(1-hydroxy-4-(trifluoromethyl)-1,3- |
| | | | dihydrobenzo[c][1,2]oxaborole-6-carbonyl)-4-(1-hydroxy-4- |
| | | | (trifluoromethyl)-1,3-dihydrobenzo[c][1,2]oxaborole-6- |
| | | | carboxamido)pyrrolidine-2-carboxylic acid |
| DS75 | FF116 | F2 | [chemical structure] |
| | | | (2S,3S)-3-(1-hydroxy-4-(trifluoromethyl)-1,3- |
| | | | dihydrobenzo[c][1,2]oxaborole-6-carboxamido)-2-(1-hydroxy-7- |
| | | | (trifluoromethyl)-1,3-dihydrobenzo[c][1,2]oxaborole-5- |
| | | | carboxamido)butanoic acid |
| DS76 | FF114 | F2 | [chemical structure] |
| | | | (R)-5-(1-hydroxy-4-(trifluoromethyl)-1,3- |
| | | | dihydrobenzo[c][1,2]oxaborole-6-carboxamido)-4-(1-hydroxy-7- |
| | | | (trifluoromethyl)-1,3-dihydrobenzo[c][1,2]oxaborole-5- |
| | | | carboxamido)pentanoic acid |
| DS77 | FF12 | F1 and F2 | [chemical structure] |
| | | | ((2S,4S)-1-(5-borono-2-nitrobenzoyl)-4-(1-hydroxy-1,3- |
| | | | dihydrobenzo[c][1,2]oxaborole-6-carboxamido)pyrrolidine-2- |
| | | | carbonyl)glycine |
| DS78 | FF12 | F1 and F2 | [chemical structure] |
| | | | ((2S,4S)-1-(5-borono-2-(methylsulfonyl)benzoyl)-4-(1-hydroxy- |
| | | | 1,3-dihydrobenzo[c][1,2]oxaborole-6-carboxamido)pyrrolidine-2- |
| | | | carbonyl)glycine |
| DS79 | FF12 | F1 and F2 | [chemical structure] |
| | | | ((2S,4S)-1-(3-borono-2,6-difluorobenzoyl)-4-(1-hydroxy-1,3- |
| | | | dihydrobenzo[c][1,2]oxaborole-6-carboxamido)pyrrolidine-2- |
| | | | carbonyl)glycine |
| DS80 | FF221 | F1 | [chemical structure] |
| | | | (S)-(3-((3-borono-4-fluorobenzyl)(5,6-diamino-6- |
| | | | oxohexyl)carbamoyl)-5-nitrophenyl)boronic acid |
| DS81 | FF221 | F1 | [chemical structure] |
| | | | (S)-(3-((4-borono-3,5-difluorobenzyl)(5,6-diamino-6- |
| | | | oxohexyl)carbamoyl)-5-nitrophenyl)boronic acid |
| DS82 | FF221 | F1 | [chemical structure] |
| | | | (S)-(3-((3-boronobenzyl)(5,6-diamino-6-oxohexyl)carbamoyl)-5- |
| | | | nitrophenyl)boronic acid |
| DS83 | FF221 | F1 | [chemical structure] |
| | | | (S)-(3-((4-borono-2-methoxybenzyl)(5,6-diamino-6- |
| | | | oxohexyl)carbamoyl)-5-nitrophenyl)boronic acid |
| DS84 | FF221 | F1 | [chemical structure] |
| | | | (S)-(3-((4-borono-2-(trifluoromethyl)benzyl)(5,6-diamino-6- |
| | | | oxohexyl)carbamoyl)-5-nitrophenyl)boronic acid |
| DS85 | FF221 | F1 | [chemical structure] |
| | | | (S)-(5-((3-borono-N-(5,6-diamino-6-oxohexyl)-4- |
| | | | fluorobenzamido)methyl)-2-fluorophenyl)boronic acid |
| DS86 | FF221 | F1 | [chemical structure] |
| | | | (S)-(5-((4-borono-3,5-difluorobenzyl)(5,6-diamino-6- |
| | | | oxohexyl)carbamoyl)-2-fluorophenyl)boronic acid |
| DS87 | FF221 | F1 | [chemical structure] |
| | | | (S)-(3-((3-borono-N-(5,6-diamino-6-oxohexyl)-4- |
| | | | fluorobenzamido)methyl)phenyl)boronic acid |
| DS88 | FF221 | F1 | [chemical structure] |
| | | | (S)-(5-((4-borono-2-methoxybenzyl)(5,6-diamino-6- |
| | | | oxohexyl)carbamoyl)-2-fluorophenyl)boronic acid |
| DS89 | FF221 | F1 | [chemical structure] |
| | | | (S)-(5-((4-borono-3-(trifluoromethyl)benzyl)(5,6-diamino-6- |
| | | | oxohexyl)carbamoyl)-2-fluorophenyl)boronic acid |
| DS90 | FF221 | F1 | [chemical structure] |
| | | | (S)-(4-((3-borono-4-fluorobenzyl)(5,6-diamino-6- |
| | | | oxohexyl)carbamoyl)-2-fluorophenyl)boronic acid |
| DS91 | FF221 | F1 | [chemical structure] |
| | | | (S)-(4-((4-borono-3,5-difluorobenzyl)(5,6-diamino-6- |
| | | | oxohexyl)carbamoyl)-2-fluorophenyl)boronic acid |
| DS92 | FF221 | F1 | [chemical structure] |
| | | | (S)-(4-((3-boronobenzyl)(5,6-diamino-6-oxohexyl)carbamoyl)-2- |
| | | | fluorophenyl)boronic acid |
| DS93 | FF221 | F1 | [chemical structure] |
| | | | (S)-(4-((4-borono-2-methoxybenzyl)(5,6-diamino-6- |
| | | | oxohexyl)carbamoyl)-2-fluorophenyl)boronic acid |
| DS94 | FF221 | F1 | [chemical structure] |
| | | | (S)-(4-((4-borono-2-(trifluoromethyl)benzyl)(5,6-diamino-6- |
| | | | oxohexyl)carbamoyl)-2-fluorophenyl)boronic acid |
| DS95 | FF221 | F1 | [chemical structure] |
| | | | (S)-(5-((3-borono-5-bromo-N-(5,6-diamino-6- |
| | | | oxohexyl)benzamido)methyl)-2-fluorophenyl)boronic acid |
| DS96 | FF221 | F1 | [chemical structure] |
| | | | (S)-(3-((4-borono-3,5-difluorobenzyl)(5,6-diamino-6- |
| | | | oxohexyl)carbamoyl)-5-bromophenyl)boronic acid |
| DS97 | FF221 | F1 | [chemical structure] |
| | | | (S)-(3-((3-borono-5-bromo-N-(5,6-diamino-6- |
| | | | oxohexyl)benzamido)methyl)phenyl)boronic acid |
| DS98 | FF221 | F1 | [chemical structure] |
| | | | (S)-(3-((3-borono-5-bromo-N-(5,6-diamino-6- |
| | | | oxohexyl)benzamido)methyl)-5-methoxyphenyl)boronic acid |
| DS99 | FF221 | F1 | [chemical structure] |
| | | | (S)-(3-((4-borono-2-(trifluoromethyl)benzyl)(5,6-diamino-6- |
| | | | oxohexyl)carbamoyl)-5-bromophenyl)boronic acid |
| DS100 | FF221 | F1 | [chemical structure] |
| | | | (S)-(3-((3-borono-4-fluorobenzyl)(5,6-diamino-6- |
| | | | oxohexyl)carbamoyl)-5-fluorophenyl)boronic acid |
| DS101 | FF221 | F1 | [chemical structure] |
| | | | (S)-(3-((4-borono-3-methoxybenzyl)(5,6-diamino-6- |
| | | | oxohexyl)carbamoyl)-5-fluorophenyl)boronic acid |
| DS102 | FF221 | F1 | [chemical structure] |
| | | | (S)-(3-((4-borono-2-(trifluoromethyl)benzyl)(5,6-diamino-6- |
| | | | oxohexyl)carbamoyl)-5-fluorophenyl)boronic acid |
| DS103 | FF221 | F1 and F2 | [chemical structure] |
| | | | (S)-(4-((N-(5,6-diamino-6-oxohexyl)-1-hydroxy-1,3- |
| | | | dihydrobenzo[c][1,2]oxaborole-6-carboxamido)methyl)-2- |
| | | | fluorophenyl)boronic acid |
| DS104 | FF221 | F1 and F2 | [chemical structure] |
| | | | (S)-(4-((N-(5,6-diamino-6-oxohexyl)-1-hydroxy-1,3- |
| | | | dihydrobenzo[c][1,2]oxaborole-6-carboxamido)methyl)-2,6- |
| | | | difluorophenyl)boronic acid |
| DS105 | FF221 | F1 and F2 | [chemical structure] |
| | | | (S)-(3-((N-(5,6-diamino-6-oxohexyl)-1-hydroxy-1,3- |
| | | | dihydrobenzo[c][1,2]oxaborole-6- |
| | | | carboxamido)methyl)phenyl)boronic acid |
| DS106 | FF221 | F1 and F2 | [chemical structure] |
| | | | (S)-(4-((N-(5,6-diamino-6-oxohexyl)-1-hydroxy-1,3- |
| | | | dihydrobenzo[c][1,2]oxaborole-6-carboxamido)methyl)-3- |
| | | | methoxyphenyl)boronic acid |
| DS107 | FF221 | F2 | [chemical structure] |
| | | | (S)-N-(5,6-diamino-6-oxohexyl)-1-hydroxy-N-((1-hydroxy-1,3- |
| | | | dihydrobenzo[c][1,2]oxaborol-6-yl)methyl)-1,3- |
| | | | dihydrobenzo[c][1,2]oxaborole-6-carboxamide |
| DS108 | FF221 | F2 | [chemical structure] |
| | | | (S)-N-(4-amino-3-(1-hydroxy-1,3-dihydrobenzo[c][1,2]oxaborole- |
| | | | 6-carboxamido)-4-oxobutyl)-1-hydroxy-N-((1-hydroxy-1,3- |
| | | | dihydrobenzo[c][1,2]oxaborol-6-yl)methyl)-1,3- |
| | | | dihydrobenzo[c][1,2]oxaborole-6-carboxamide |
| DS109 | FF221 | F2 | [chemical structure] |
| | | | (S)-N-(6-amino-5-(1-hydroxy-1,3-dihydrobenzo[c][1,2]oxaborole- |
| | | | 6-carboxamido)-6-oxohexyl)-1-hydroxy-N-((1-hydroxy-1,3- |
| | | | dihydrobenzo[c][1,2]oxaborol-6-yl)methyl)-1,3- |
| | | | dihydrobenzo[c][1,2]oxaborole-6-carboxamide |

### Synthesis of Compounds of Formula I

[0734] An illustrative synthesis protocol is provided that can be used to synthesize any of the examples described.

[0735] The lines connecting cysteine residues are disulfide bonds. For the sake of clarity, the H— at the N-terminus of the A- and B-chain of insulin is not histidine, it is the hydrogen of the N-terminus. The —OH shown at the C-terminal end of the A- and B-chain is the C-terminus of the respective chain.

Synthesis of Modified Insulins

### A-Chain Synthesis:

[chemical structure]

### Synthesis of A-Chain and Modified A-Chain of Example 870 was Accomplished Using Conventional Solid-Phase Peptide Synthesis (SPPS)

[0737] MPA resin (0.22 mmol/eq) was swelled in a mixture of DMF:DCM (50:50, v:v). A solution of potassium iodide with DIPEA (1 M) in DMF was added to the reaction vessel along with Fmoc-Asn(Trt)-OH (0.2 M). The reaction vessel was heated to 75° C. Each amino acid coupling step involved i) deprotection with 20% piperidine in DMF at 90° C.; ii) washing with DMF; iii) activation and coupling of Fmoc protected amino acids with 0.5 M N,N′-diisopropylcarbodiimide (DIC, 1 mL), 0.5 M Oxyma, and 0.2 M Fmoc-amino acid in DMF at 90° C.; iv) washing with DMF.

### Global Deprotection and Isolation.

[0738] Crude peptide was globally deprotected in TFA:TIPS:H₂O (95:2.5:2.5) and gently agitated for 2 h. Crude solution was filtered and peptide was precipitated in cold ether, centrifuged and washed with additional cold ether. Supernatant was decanted and the crude peptide was dried under a gentle stream of nitrogen gas. Crude peptide was dissolved in 20% ACN in water and fractionated by RP-HPLC on a C18 column.

### B-Chain Synthesis:

[chemical structure]

### Synthesis of Modified B-Chain Insulins Using Solid-Phase Peptide Synthesis (SPPS).

[0740] MPA resin (0.22 mmol/eq) was swelled in a mixture of DMF:DCM (50:50, v:v). A solution of potassium iodide (125 mM) with DIPEA (1 M) in DMF was added to the reaction vessel along with Fmoc-Lys(ivDde)-OH (0.2 M). The reaction vessel was heated to 75° C. Each amino acid coupling step involved i) deprotection with 20% piperidine in DMF at 90° C.; ii) washing with DMF; iii) activation and coupling of Fmoc protected amino acids with 0.5 M N,N′-diisopropylcarbodiimide (DIC), 0.5 M Oxyma, and 0.2 M Fmoc-amino acid in DMF at 90° C.; iv) washing with DMF. Fmoc-Arg(Pbf)-OH was coupled twice using the methods described above.

### Deprotection IVdde and Add Diboronates to B Chain.

[0741] The ivDde protecting group on the lysine residue was removed with 4% hydrazine in DMF, then washed with DMF. A solution of bromo acetic acid (0.2 M, 2 mL) in DMF with DIC (0.5 M, 2 mL) was added immediately and gently mixed for 4 hr. The resin was washed with DMF (3×5 mL). A solution of 1,3-phenylenedimethanamine (1M) in DMF (5 mL) was added to the resin and heated at 50 C for 10 minutes. The resin was washed with DMF (3×5 mL) and a solution of 1-hydroxy-1,3-dihydrobenzo[c][1,2]oxaborole-6-carboxylic acid (0.2 M, 5 mL) in DMF with 1 M N,N′-diisopropylcarbodiimide (DIC, 1M, 1 mL), Oxyma (0.5 M, 2 mL) in DMF and heated at 50 C for 30 min.

### Cleavage and Addition of DTDP to B-Chain.

[0742] Crude peptide was globally deprotected with 2,2′-Dithiopyridine (DTDP) in TFA:TIPS:H₂O (95:2.5:2.5) and gently agitated. Crude solution was filtered and peptide was precipitated in cold ether, centrifuged, decanted, washed with additional cold ether, and centrifuged again. Supernatant was decanted and the crude peptide was dried under a gentle stream of nitrogen gas. Crude peptide was dissolved in 20% ACN in water and fractionated by RP-HPLC on a C18 column.

### Combination of A and B Chains of Insulin and Modified Insulins.

[0743] A chain of insulin was combined with B chain in 0.2 M NH₄HCO₃ with 6M urea and at pH 8. Mixture was gently agitated, diluted with water and fractionated by RP-HPLC on a C18 column.

### Deprotection of Acm Protecting Groups and Final Oxidation.

[0744] The combined intermediate was dissolved in glacial acetic acid and water and vortexed vigorously. A solution of iodine in glacial acetic acid (20 equiv) was added to the reaction mixture and gently agitated. A solution of ascorbic acid (5 mM) was added directly to the reaction mixture. The mixture was diluted in 20% ACN in water and fractionated by RP-HPLC on a Higgins C18 column to give Example 870.

[0745] Similar procedures can be followed for the synthesis of Examples 1 to 869 and 871 to 876.

### B. Testing of Compounds for Activity in Biological Assays

[0746] Exemplary compounds DS01-DS79 of the present disclosure were tested using an alizarin red S (ARS) displacement assay.

### Procedure for Determination of the Glucose, Fructose, and Lactate Binding (Kd) Using ARS Displacement Assay

[0747] The association constant for the binding event between Alizarin Red S (ARS) and the exemplary compounds tested was determined using standard methods in the art. Triplicate titrations of 10⁻⁵ M ARS in 0.1 M phosphate buffer, pH 7.4, were performed in a 96-well plate against serial dilutions of example compounds, ranging in concentration from 0-0.1M at 25° C. The example compound-ARS solution was incubated for 5-45 minutes at 25° C., and absorbance intensity was measured using excitation wavelength 468 nm and emission wavelength 585 nm. Changes in intensity were plotted against the concentration of the example compound, and the intensity data was fitted to yield an association constant for ARS binding.

[0748] The association constant for the binding between a target sugar compound (e.g., glucose) and the tested aromatic boron-containing groups was determined via the displacement of ARS bound to the example compounds. Triplicate wells of 10⁻⁵ M ARS and 0.1 M example compounds in 0.1 M phosphate buffer, pH 7.4, were titrated in a 96-well plate against serial dilutions of the target sugar compound, ranging in concentration from 0-2.0 M at 25° C. The boron-ARS-carbohydrate solution was incubated for 30-60 minutes at 25° C. and the intensity of each well was measured in a plate reader at excitation wavelength 468 nm and emission wavelength 585 nm.

[0749] Changes in intensity were plotted against concentration of the target sugar compound, and the data was fitted to a one-site competition equation:

$$y = min ( y ) + ( max ( y ) - min ( y ) ) / ( 1 + 1 {0}^{x - logEC 50} )$$

to yield an association constant for the boron compound-target sugar compound binding event.

[0750] The binding constants of DS01-DS109 to glucose, fructose, and/or lactate were tested and were calculated, except DS76 was not tested for glucose binding, DS57 and DS75 were not tested for fructose or lactate binding. The tested compounds had Kd values ranging from ˜0.8 mM to ˜486 mM for glucose, −0.9 mM to ˜52 mM for fructose, and ˜24 to ˜425 mM for lactate.

### In Vitro Demonstration of Activity for Compounds of Formula I

[0751] CHO cells constitutively expressing Human Insulin Receptor Isoform β were plated in a 96-well tissue culture microplate at 35,000 cells/well and grown overnight in RPMI media supplemented with Glutamine and 10% Fetal Bovine Serum (growth media). The next morning, growth media was replaced with fresh growth media.

[0752] A separate microplate was prepared with a stepwise serial dilution of glucose-responsive insulin in DMEM media, without glucose, without phenol red, with 4% w/v serum albumin; wells of serially diluted compounds of Formula I were prepared in triplicate with an appropriate “high” and “low” concentration of glucose to determine change in potency of compounds of Formula I at various potential blood glucose levels.

[0753] Growth media on cells was then replaced with DMEM media, no glucose, no phenol red for 5 minutes. The media was aspirated and replaced with the contents of the prepared plate (spiking media) for 10 minutes. The spiking media was aspirated and the cells were fixed with 10% neutral buffered formalin for 10 minutes. The neutral buffered formalin was aspirated, and the microplate was stringently washed with PBS, pH 7.4. The microplate was then blocked with PBS, pH 7.4 supplemented with 10% v/v Fetal Bovine Serum and 0.1% Triton X-100 for 30 minutes. The plate was then stained at 4° C. overnight with 5% FBS in PBS+1:680 v:v of Rb α-phospho-Y1150/Y1151 IR antibody (Cell Signaling Technologies #3024). After stringent washes with PBS, pH 7.4, the microplate was incubated at 37° C. in 5% FBS in PBS+1:1000 of 2° Ab, HRP α-Rabbit (Cell Signaling Technologies, #7074) for 100 minutes. The plate was stringently washed with PBS, pH 7.4, and colorimetric readout was developed for 15 minutes at 37° C. using TMB substrate. Color development was stopped with the addition of 0.1 M hydrochloric acid and absorbance measured at 450 nm. Triplicate absorbance values were plotted in GraphPad Prism and analyzed using a four-parameter logistic regression to generate dose-response curves, and the EC50 of the dose-response curves were compared to assess fold activation of the exemplary compounds of Formula I from low to high glucose concentration.

[0754] Examples 315, 318, 320, 565, 590, 606, 611, and 803-880 had an IR Phosphorylation (fold change) ranging from ≥1.2 to 45.

### In Vivo Demonstration of Activity for Compounds of Formula I

[0755] Diabetes was induced in 12-week-old B6 mice using streptozocin (STZ) treatment. Three weeks after the final STZ treatment, blood glucose of the mice was sampled from lateral tail vein to confirm diabetes. Mice with blood glucose of >200 mg/dl were deemed to be diabetic and fasted for 1-6 hours prior to injection. Human insulin and a compound of Formula I in sterile phosphate buffered saline, pH 7.4 were injected either subcutaneously via neck scruff or intraperitoneally, depending on the experiment. Blood glucose was sampled with a glucometer via lateral tail vein at 15-minute intervals. After one hour of initial stabilization of blood glucose levels post-insulin injection, mice were challenged with an intraperitoneal injection of glucose (e.g., 2 g/kg, 4 g/kg, or 6 g/kg; the actual dose depends on the example and experiment) in sterile phosphate buffered saline. The exemplary compound activated to lower blood glucose upon the introduction of a glucose bolus, while human insulin did not activate in a glucose-dependent manner.

[0756] The above experiment showed in vivo preferential activity response of an exemplary compound of the disclosure to glucose.

[0757] Streptozotocin-treated mice (55 mg/kg, 5 days) undergo surgical catheterization of a carotid artery and jugular vein for blood sampling and infusions. After a recovery period of 3-4 days, mice are placed in an experimental chamber, connected to sampling/infusion lines, and briefly fasted. Somatostatin (5 mg/kg/min) is continuously infused throughout the study. At time 0 min, biosynthetic human insulin (BHI) or a compound of Formula I are infused at 4 mU/kg/min and glucose is infused at variable rates to achieve steady state (“clamped”) at pre-determined glycemic levels. Blood glucose (BG) is clamped in windows of stepwise increasing blood glucose concentration. Steady-state Glucose Infusion Rate (GIR) is measured for each step increase in clamped blood glucose and plotted to assess the increase in GIR as a function of increasing blood glucose. As BG increases, compounds of Formula I require greater GIR to maintain clamped BG than does BHI, demonstrating a glucose-responsive increase in compound glucose-lowering action with increased BG concentrations.

[0758] It is also observed in cell-based experiments on compounds containing formulae FF50-FF62, FF116, and FF121-FF134 that sensors with geminal alkyl substituent on the same carbon as the nitrogen conjugated to the boroxole or boronates provided between 5-56% higher glucose responsiveness in the range of 3-20 mM glucose in comparison to variants that do not have the geminal alkyl substituents. For example, when a Z1C represented by one of formulae FF50-FF62, FF116, and FF121-134 is conjugated to lysine residues in insulin wherein the boronates (B1,B2) in formulae FF50-FF62, FF116, and FF121-134 are represented by F2, the resulting insulin is observed to be between 11-56% more responsive to changes in glucose levels between 3-20 mM glucose than if instead of one of formulae FF50-FF62, FF116, and FF121-134, one uses 2,3-diaminopropionic acid. This data shows that the presence of the geminal alkyl substituent on the same carbon as the nitrogen conjugated to the boroxole or boronates improves glucose responsiveness of the resulting insulin conjugate, and in tested variations in the 3-20 mM glucose range. Without wishing to be bound by theory, it is believed that this general principle extends to other formulae FF50-FF62, FF116, and FF121-FF134 providing a framework for enhancement of glucose responsiveness by at least 5%, at least 10%, at least 20%, or at least 40% in the 3-20 mM or 2-50 mM glucose ranges. Without wishing to be bound by theory, it is believed based on observations of glucose responsiveness trends, that the presence of the carbonyl group adjacent to- or within less than two carbon centers away from the amine groups in FF formulae (to which aromatic boron-containing groups are conjugated) enhances glucose responsiveness through impacting ability to turn off activity of drug substance through plasma protein interactions such as with albumin and that this is independent of glucose affinity such that glucose affinity is not impacted by the position of this carbonyl group. Without wishing to be bound by theory, it is believed that the pharmacokinetics of the molecules and potential albumin or blood proteins binding is impacted by the position of this carbonyl group, and thereby enhances overall glucose responsiveness whilst the absolute glucose affinity is maintained or nearly identical. Therefore, in certain embodiments of the present invention, the carbonyl group (as part of an acid, amid or linkage to X in FF formulae) is placed within less than three-, or within less than two-carbon center away from one of the two amines to which the boron-containing compounds are conjugated. In certain embodiments, the placement of amines within two carbon centers from each other enables the spatial and geometric constraining of the aromatic boron containing groups to enhance glucose binding and selectively, and furthermore the presence of a carbonyl group (for example, as part of an amide linkage) which is within less than two carbon centers, from one of the two amines (to which aromatic boron containing groups are attached) ensures differential albumin binding in a manner that results in the compound exhibiting glucose responsiveness in the blood and in the body. In some embodiments, the combination of geometrical constraining of the two amines to which the aromatic boron containing groups are conjugated, as well as the presence of the carbonyl within one to two carbon centers from one of the amines provides the necessary requirements for glucose responsiveness in physiological blood and plasma glucose levels. Experiments on cell-based assays of insulins with lysines conjugated with one of formulae FF50-FF62, FF116, and FF121-134 demonstrated that the enhanced glucose responsiveness of the insulins is increased when one or more lysines are modified as described by Formula I using one of formulae FF50-FF62, FF116, and FF121-134, and wherein the lysines are present in insulin (as insertions or mutations) or in a polypeptide that is appended to the N- or C-terminus of the B-chain of insulin or the C-terminus of the A-chain of insulin, and wherein there are additional lysine residues within the insulin sequence that are similarly modified. The results are further corroborated by testing of the compounds of Formula I in STZ diabetic mouse models wherein the activity of the insulin is measured through bolus injections of the compounds of Formula I followed by glucose challenges and measurements of blood glucose, or through glucose clamp assays in which activity of the insulins is measured as a function of blood glucose levels. The results further showed that exemplary compounds of Formula I disclosed herein function in the body and are responsive to physiological changes in blood glucose and provide dynamic insulin action in the body in response to changes in blood glucose levels.

[0759] In certain embodiments a sequence is appended to the N-terminus and/or C-terminus, and/or inserted into the sequence of the A-chain of insulin, wherein the A-chain of insulin comprises one of the following sequences, optionally with up to four additional deletions and/or mutations:

(SEQ ID NO: 1)
GIVEQCCTSICSLYQLENYCN,
(SEQ ID NO: 3)
GIVKQCCTSICSLYQLENYCN,
(SEQ ID NO: 4)
GIVEQCCHSICSLYQLENYCN,
(SEQ ID NO: 5)
GIVEQCCASICSLYQLENYCN,
(SEQ ID NO: 6)
GIVEQCCTRICSLYQLENYCN,
(SEQ ID NO: 7)
GIVEQCCTKICSLYQLENYCN,
(SEQ ID NO: 8)
GIVEQCCTSICSEYQENYCN,
(SEQ ID NO: 9)
GIVKQCCTSICSLYQLENYCG,
(SEQ ID NO: 10)
GIVEQCCHSICSLYQLENYCG,
(SEQ ID NO: 11)
GIVEQCCASICSLYQLENYCG,
(SEQ ID NO: 12)
GIVEQCCTRICSLYQLENYCG,
(SEQ ID NO: 13)
GIVEQCCTKICSLYQLENYCG,
(SEQ ID NO: 14)
GIVEQCCTSICSEYQENYCG,
(SEQ ID NO: 15)
GIVEQCCTSICSEYQENYC,
(SEQ ID NO: 16)
GIVEQCCTSICSLYQLENYCNK,
(SEQ ID NO: 17)
KPGIVEQCCTSICSLYQLENYCN,
(SEQ ID NO: 18)
KPIVEQCCTSICSLYQLENYCN,
(SEQ ID NO: 19)
KPVEQCCTSICSLYQLENYCN,
(SEQ ID NO: 20)
KPGVEQCCTSICSLYQLENYCN,
(SEQ ID NO: 21)
GEKPVEQCCTSICSLYQLENYCN,
(SEQ ID NO: 22)
KPGEKPVEQCCTSICSLYQLENYCN,
(SEQ ID NO: 23)
KPVEQCCTSICSLYQLENYCNK,
(SEQ ID NO: 24)
KPVEQCCTSICSLYQLENYCNEKP,
(SEQ ID NO: 25)
GIVEQCCTSICSLYQLENYCGK,
(SEQ ID NO: 26)
KPGIVEQCCTSICSLYQLENYCG,
(SEQ ID NO: 27)
KPIVEQCCTSICSLYQLENYCG,
(SEQ ID NO: 28)
KPVEQCCTSICSLYQLENYCG,
(SEQ ID NO: 29)
KPGVEQCCTSICSLYQLENYCG,
(SEQ ID NO: 30)
GEKPVEQCCTSICSLYQLENYCG,
(SEQ ID NO: 31)
KPGEKPVEQCCTSICSLYQLENYCG,
(SEQ ID NO: 32)
KPVEQCCTSICSLYQLENYCGK,
(SEQ ID NO: 33)
KPVEQCCTSICSLYQLENYCGEKP,

[0760] and/or a sequence is appended to the N-terminus and/or C-terminus, and/or inserted into the sequence of the B-chain of insulin, wherein the B-chain of insulin comprises one of following sequences, and optionally with up to four additional deletions and/or mutations:

(SEQ ID NO: 2)
FVNQHLCGSHLVEALYLVCGERGFFYTPKT,
(SEQ ID NO: 34)
FVNQHLCGSHLVEALYLVCGERGFFYTP,
(SEQ ID NO: 35)
FVNQHLCGSHLVEALYLVCGKRGFFYTP,
(SEQ ID NO: 36)
FVNQHLCGSHLVEALYLVCGKRGFFYTPRT,
(SEQ ID NO: 37)
FVNQHLCGSHLVEALYLVCGKRGFFYT,
(SEQ ID NO: 38)
VNQHLCGSHLVEALYLVCGERGFFYTPKT,
(SEQ ID NO: 39)
NQHLCGSHLVEALYLVCGERGFFYTPKT,
(SEQ ID NO: 40)
QHLCGSHLVEALYLVCGERGFFYTPKT,
(SEQ ID NO: 41)
PFVNQHLCGSHLVEALYLVCGERGFFYTPKT,
(SEQ ID NO: 42)
PFVNQHLCGSHLVEALYLVCGKRGFFYTPRT,
(SEQ ID NO: 43)
PFVNQHLCGSHLVEALYLVCGKEGFFYTPRT,
(SEQ ID NO: 44)
PFVNQHLCGSHLVEALYLVCGKRGFFYTPR,
(SEQ ID NO: 45)
PFVNQHLCGSHLVEALYLVCGKRGFFYTRPT,
(SEQ ID NO: 46)
PFVNQHLCGSHLVEALYLVCGKRGFFYTRP,
(SEQ ID NO: 47)
PFVNQHLCGSHLVEALYLVCGKNGFFYTPRT,
(SEQ ID NO: 48)
PFVNQHLCGSHLVEALYLVCGKNGFFYTPRT,
(SEQ ID NO: 49)
PFVNQHLCGSHLVEALYLVCGKNGFFYTPR,
(SEQ ID NO: 50)
PFVNQHLCGSHLVEALYLVCGKNGFFYTRPT,
(SEQ ID NO: 51)
PFVNQHLCGSHLVEALYLVCGKNGFFYTRP,
(SEQ ID NO: 52)
PFVNQHLCGSHLVEALYLVCGKEGFFYTPRT,
(SEQ ID NO: 53)
PFVNQHLCGSHLVEALYLVCGKEGFFYTPRT,
(SEQ ID NO: 54)
PFVNQHLCGSHLVEALYLVCGKEGFFYTPR,
(SEQ ID NO: 55)
PFVNQHLCGSHLVEALYLVCGKEGFFYTRPT,
(SEQ ID NO: 56)
PFVNQHLCGSHLVEALYLVCGKEGFFYTRP,
(SEQ ID NO: 57)
PFVNQHLCGSHLVEALYLVCGKRGFFYTPR,
(SEQ ID NO: 58)
PVNQHLCGSHLVEALYLVCGERGFFYTPKT,
(SEQ ID NO: 59)
PVNQHLCGSHLVEALYLVCGKRGFFYTPRT,
(SEQ ID NO: 60)
PVNQHLCGSHLVEALYLVCGKRGFFYTPR,
(SEQ ID NO: 61)
PNQHLCGSHLVEALYLVCGERGFFYTPKT,
(SEQ ID NO: 62)
PNQHLCGSHLVEALYLVCGKRGFFYTPRT,
(SEQ ID NO: 63)
PNQHLCGSHLVEALYLVCGKRGFFYTPR,
(SEQ ID NO: 64)
PQHLCGSHLVEALYLVCGERGFFYTPKT,
(SEQ ID NO: 65)
PQHLCGSHLVEALYLVCGKRGFFYTPRT,
(SEQ ID NO: 66)
PQHLCGSHLVEALYLVCGKRGFFYTPR,
(SEQ ID NO: 67)
PFVNQHLCGSHLVEALYLVCGERGFFYTKPT,
(SEQ ID NO: 68)
PFVNQHLCGSHLVEALYLVCGERGFFYTKP,
(SEQ ID NO: 69)
PVNQHLCGSHLVEALYLVCGERGFFYTKPT,
(SEQ ID NO: 70)
PVNQHLCGSHLVEALYLVCGERGFFYTKP,
(SEQ ID NO: 71)
PNQHLCGSHLVEALYLVCGERGFFYTKPT,
(SEQ ID NO: 72)
PNQHLCGSHLVEALYLVCGERGFFYTKP,
(SEQ ID NO: 73)
PQHLCGSHLVEALYLVCGERGFFYTKPT,
(SEQ ID NO: 74)
FVNQHLCGSHLVEALYLVCGERGFFYTPK,
(SEQ ID NO: 24047)
FVNQHLCGSHLVEALYLVCGKRGFFYTPKT,
and
(SEQ ID NO: 24048)
FVNQHLCGSHLVEALYLVCGKRGFFYTPR.

### C. Exemplary Compounds

[0761] The following are non-limiting examples of compounds of Formula I, that can be prepared according to the methods described herein.

The application's sequence listing, which the Patent Office published only in electronic form, follows.

SEQUENCE LISTING (24050 sequences)

SEQ ID NO: 1 - protein, 21 aa, Homo sapiens
GIVEQCCTSICSLYQLENYCN

SEQ ID NO: 2 - protein, 30 aa, Homo sapiens
FVNQHLCGSHLVEALYLVCGERGFFYTPKT

SEQ ID NO: 3 - protein, 21 aa, Artificial Sequence
  Synthetic Construct
GIVKQCCTSICSLYQLENYCN

SEQ ID NO: 4 - protein, 21 aa, Artificial Sequence
  Synthetic Construct
GIVEQCCHSICSLYQLENYCN

SEQ ID NO: 5 - protein, 21 aa, Artificial Sequence
  Synthetic Construct
GIVEQCCASICSLYQLENYCN

SEQ ID NO: 6 - protein, 21 aa, Artificial Sequence
  Synthetic Construct
GIVEQCCTRICSLYQLENYCN

SEQ ID NO: 7 - protein, 21 aa, Artificial Sequence
  Synthetic Construct
GIVEQCCTKICSLYQLENYCN

SEQ ID NO: 8 - protein, 20 aa, Artificial Sequence
  Synthetic Construct
GIVEQCCTSICSEYQENYCN

SEQ ID NO: 9 - protein, 21 aa, Artificial Sequence
  Synthetic Construct
GIVKQCCTSICSLYQLENYCG

SEQ ID NO: 10 - protein, 21 aa, Artificial Sequence
  Synthetic Construct
GIVEQCCHSICSLYQLENYCG

SEQ ID NO: 11 - protein, 21 aa, Artificial Sequence
  Synthetic Construct
GIVEQCCASICSLYQLENYCG

SEQ ID NO: 12 - protein, 21 aa, Artificial Sequence
  Synthetic Construct
GIVEQCCTRICSLYQLENYCG

SEQ ID NO: 13 - protein, 21 aa, Artificial Sequence
  Synthetic Construct
GIVEQCCTKICSLYQLENYCG

SEQ ID NO: 14 - protein, 20 aa, Artificial Sequence
  Synthetic Construct
GIVEQCCTSICSEYQENYCG

SEQ ID NO: 15 - protein, 19 aa, Artificial Sequence
  Synthetic Construct
GIVEQCCTSICSEYQENYC

SEQ ID NO: 16 - protein, 22 aa, Artificial Sequence
  Synthetic Construct
GIVEQCCTSICSLYQLENYCNK

SEQ ID NO: 17 - protein, 23 aa, Artificial Sequence
  Synthetic Construct
KPGIVEQCCTSICSLYQLENYCN

SEQ ID NO: 18 - protein, 22 aa, Artificial Sequence
  Synthetic Construct
KPIVEQCCTSICSLYQLENYCN

SEQ ID NO: 19 - protein, 21 aa, Artificial Sequence
  Synthetic Construct
KPVEQCCTSICSLYQLENYCN

SEQ ID NO: 20 - protein, 22 aa, Artificial Sequence
  Synthetic Construct
KPGVEQCCTSICSLYQLENYCN

SEQ ID NO: 21 - protein, 23 aa, Artificial Sequence
  Synthetic Construct
GEKPVEQCCTSICSLYQLENYCN

SEQ ID NO: 22 - protein, 25 aa, Artificial Sequence
  Synthetic Construct
KPGEKPVEQCCTSICSLYQLENYCN

SEQ ID NO: 23 - protein, 22 aa, Artificial Sequence
  Synthetic Construct
KPVEQCCTSICSLYQLENYCNK

SEQ ID NO: 24 - protein, 24 aa, Artificial Sequence
  Synthetic Construct
KPVEQCCTSICSLYQLENYCNEKP

SEQ ID NO: 25 - protein, 22 aa, Artificial Sequence
  Synthetic Construct
GIVEQCCTSICSLYQLENYCGK

SEQ ID NO: 26 - protein, 23 aa, Artificial Sequence
  Synthetic Construct
KPGIVEQCCTSICSLYQLENYCG

SEQ ID NO: 27 - protein, 22 aa, Artificial Sequence
  Synthetic Construct
KPIVEQCCTSICSLYQLENYCG

SEQ ID NO: 28 - protein, 21 aa, Artificial Sequence
  Synthetic Construct
KPVEQCCTSICSLYQLENYCG

SEQ ID NO: 29 - protein, 22 aa, Artificial Sequence
  Synthetic Construct
KPGVEQCCTSICSLYQLENYCG

SEQ ID NO: 30 - protein, 23 aa, Artificial Sequence
  Synthetic Construct
GEKPVEQCCTSICSLYQLENYCG

SEQ ID NO: 31 - protein, 25 aa, Artificial Sequence
  Synthetic Construct
KPGEKPVEQCCTSICSLYQLENYCG

SEQ ID NO: 32 - protein, 22 aa, Artificial Sequence
  Synthetic Construct
KPVEQCCTSICSLYQLENYCGK

SEQ ID NO: 33 - protein, 24 aa, Artificial Sequence
  Synthetic Construct
KPVEQCCTSICSLYQLENYCGEKP

SEQ ID NO: 34 - protein, 28 aa, Artificial Sequence
  Synthetic Construct
FVNQHLCGSHLVEALYLVCGERGFFYTP

SEQ ID NO: 35 - protein, 28 aa, Artificial Sequence
  Synthetic Construct
FVNQHLCGSHLVEALYLVCGKRGFFYTP

SEQ ID NO: 36 - protein, 30 aa, Artificial Sequence
  Synthetic Construct
FVNQHLCGSHLVEALYLVCGKRGFFYTPRT

SEQ ID NO: 37 - protein, 27 aa, Artificial Sequence
  Synthetic Construct
FVNQHLCGSHLVEALYLVCGKRGFFYT

SEQ ID NO: 38 - protein, 29 aa, Artificial Sequence
  Synthetic Construct
VNQHLCGSHLVEALYLVCGERGFFYTPKT

SEQ ID NO: 39 - protein, 28 aa, Artificial Sequence
  Synthetic Construct
NQHLCGSHLVEALYLVCGERGFFYTPKT

SEQ ID NO: 40 - protein, 27 aa, Artificial Sequence
  Synthetic Construct
QHLCGSHLVEALYLVCGERGFFYTPKT

SEQ ID NO: 41 - protein, 31 aa, Artificial Sequence
  Synthetic Construct
PFVNQHLCGSHLVEALYLVCGERGFFYTPKT

SEQ ID NO: 42 - protein, 31 aa, Artificial Sequence
  Synthetic Construct
PFVNQHLCGSHLVEALYLVCGKRGFFYTPRT

SEQ ID NO: 43 - protein, 31 aa, Artificial Sequence
  Synthetic Construct
PFVNQHLCGSHLVEALYLVCGKEGFFYTPRT

SEQ ID NO: 44 - protein, 30 aa, Artificial Sequence
  Synthetic Construct
PFVNQHLCGSHLVEALYLVCGKRGFFYTPR

SEQ ID NO: 45 - protein, 31 aa, Artificial Sequence
  Synthetic Construct
PFVNQHLCGSHLVEALYLVCGKRGFFYTRPT

SEQ ID NO: 46 - protein, 30 aa, Artificial Sequence
  Synthetic Construct
PFVNQHLCGSHLVEALYLVCGKRGFFYTRP

SEQ ID NO: 47 - protein, 31 aa, Artificial Sequence
  Synthetic Construct
PFVNQHLCGSHLVEALYLVCGKNGFFYTPRT

SEQ ID NO: 48 - protein, 31 aa, Artificial Sequence; identical to SEQ ID NO: 47
  Synthetic Construct

SEQ ID NO: 49 - protein, 30 aa, Artificial Sequence
  Synthetic Construct
PFVNQHLCGSHLVEALYLVCGKNGFFYTPR

SEQ ID NO: 50 - protein, 31 aa, Artificial Sequence
  Synthetic Construct
PFVNQHLCGSHLVEALYLVCGKNGFFYTRPT

SEQ ID NO: 51 - protein, 30 aa, Artificial Sequence
  Synthetic Construct
PFVNQHLCGSHLVEALYLVCGKNGFFYTRP

SEQ ID NO: 52 - protein, 31 aa, Artificial Sequence; identical to SEQ ID NO: 43
  Synthetic Construct

SEQ ID NO: 53 - protein, 31 aa, Artificial Sequence; identical to SEQ ID NO: 43
  Synthetic Construct

SEQ ID NO: 54 - protein, 30 aa, Artificial Sequence
  Synthetic Construct
PFVNQHLCGSHLVEALYLVCGKEGFFYTPR

SEQ ID NO: 55 - protein, 31 aa, Artificial Sequence
  Synthetic Construct
PFVNQHLCGSHLVEALYLVCGKEGFFYTRPT

SEQ ID NO: 56 - protein, 30 aa, Artificial Sequence
  Synthetic Construct
PFVNQHLCGSHLVEALYLVCGKEGFFYTRP

SEQ ID NO: 57 - protein, 30 aa, Artificial Sequence; identical to SEQ ID NO: 44
  Synthetic Construct

SEQ ID NO: 58 - protein, 30 aa, Artificial Sequence
  Synthetic Construct
PVNQHLCGSHLVEALYLVCGERGFFYTPKT

SEQ ID NO: 59 - protein, 30 aa, Artificial Sequence
  Synthetic Construct
PVNQHLCGSHLVEALYLVCGKRGFFYTPRT

SEQ ID NO: 60 - protein, 29 aa, Artificial Sequence
  Synthetic Construct
PVNQHLCGSHLVEALYLVCGKRGFFYTPR

SEQ ID NO: 61 - protein, 29 aa, Artificial Sequence
  Synthetic Construct
PNQHLCGSHLVEALYLVCGERGFFYTPKT

SEQ ID NO: 62 - protein, 29 aa, Artificial Sequence
  Synthetic Construct
PNQHLCGSHLVEALYLVCGKRGFFYTPRT

SEQ ID NO: 63 - protein, 28 aa, Artificial Sequence
  Synthetic Construct
PNQHLCGSHLVEALYLVCGKRGFFYTPR

SEQ ID NO: 64 - protein, 28 aa, Artificial Sequence
  Synthetic Construct
PQHLCGSHLVEALYLVCGERGFFYTPKT

SEQ ID NO: 65 - protein, 28 aa, Artificial Sequence
  Synthetic Construct
PQHLCGSHLVEALYLVCGKRGFFYTPRT

SEQ ID NO: 66 - protein, 27 aa, Artificial Sequence
  Synthetic Construct
PQHLCGSHLVEALYLVCGKRGFFYTPR

SEQ ID NO: 67 - protein, 31 aa, Artificial Sequence
  Synthetic Construct
PFVNQHLCGSHLVEALYLVCGERGFFYTKPT

SEQ ID NO: 68 - protein, 30 aa, Artificial Sequence
  Synthetic Construct
PFVNQHLCGSHLVEALYLVCGERGFFYTKP

SEQ ID NO: 69 - protein, 30 aa, Artificial Sequence
  Synthetic Construct
PVNQHLCGSHLVEALYLVCGERGFFYTKPT

SEQ ID NO: 70 - protein, 29 aa, Artificial Sequence
  Synthetic Construct
PVNQHLCGSHLVEALYLVCGERGFFYTKP

SEQ ID NO: 71 - protein, 29 aa, Artificial Sequence
  Synthetic Construct
PNQHLCGSHLVEALYLVCGERGFFYTKPT

SEQ ID NO: 72 - protein, 28 aa, Artificial Sequence
  Synthetic Construct
PNQHLCGSHLVEALYLVCGERGFFYTKP

SEQ ID NO: 73 - protein, 28 aa, Artificial Sequence
  Synthetic Construct
PQHLCGSHLVEALYLVCGERGFFYTKPT

SEQ ID NO: 74 - protein, 29 aa, Artificial Sequence
  Synthetic Construct
FVNQHLCGSHLVEALYLVCGERGFFYTPK

SEQ ID NO: 75 - protein, 4 aa, ARTIFICIAL SEQUENCE
  Synthetic Construct
AKAA

SEQ ID NO: 76 - protein, 4 aa, ARTIFICIAL SEQUENCE
  Synthetic Construct
AKAD

SEQ ID NO: 77 - protein, 4 aa, ARTIFICIAL SEQUENCE
  Synthetic Construct
AKAE

SEQ ID NO: 78 - protein, 4 aa, ARTIFICIAL SEQUENCE
  Synthetic Construct
AKAF

SEQ ID NO: 79 - protein, 4 aa, ARTIFICIAL SEQUENCE
  Synthetic Construct
AKAG

SEQ ID NO: 80 - protein, 4 aa, ARTIFICIAL SEQUENCE
  Synthetic Construct
AKAH

SEQ ID NO: 81 - protein, 4 aa, ARTIFICIAL SEQUENCE
  Synthetic Construct
AKAI

SEQ ID NO: 82 - protein, 4 aa, ARTIFICIAL SEQUENCE
  Synthetic Construct
AKAL

SEQ ID NO: 83 - protein, 4 aa, ARTIFICIAL SEQUENCE
  Synthetic Construct
AKAN

SEQ ID NO: 84 - protein, 4 aa, ARTIFICIAL SEQUENCE
  Synthetic Construct
AKAQ

SEQ ID NO: 85 - protein, 4 aa, ARTIFICIAL SEQUENCE
  Synthetic Construct
AKAR

SEQ ID NO: 86 - protein, 4 aa, ARTIFICIAL SEQUENCE
  Synthetic Construct
AKAS

SEQ ID NO: 87 - protein, 4 aa, ARTIFICIAL SEQUENCE
  Synthetic Construct
AKAT

SEQ ID NO: 88 - protein, 4 aa, ARTIFICIAL SEQUENCE
  Synthetic Construct
AKAY

SEQ ID NO: 89 - protein, 4 aa, ARTIFICIAL SEQUENCE
  Synthetic Construct
AKDA

SEQ ID NO: 90 - protein, 4 aa, ARTIFICIAL SEQUENCE
  Synthetic Construct
AKDD

SEQ ID NO: 91 - protein, 4 aa, ARTIFICIAL SEQUENCE
  Synthetic Construct
AKDE

SEQ ID NO: 92 - protein, 4 aa, ARTIFICIAL SEQUENCE
  Synthetic Construct
AKDF

SEQ ID NO: 93 - protein, 4 aa, ARTIFICIAL SEQUENCE
  Synthetic Construct
AKDG

SEQ ID NO: 94 - protein, 4 aa, ARTIFICIAL SEQUENCE
  Synthetic Construct
AKDH

SEQ ID NO: 95 - protein, 4 aa, ARTIFICIAL SEQUENCE
  Synthetic Construct
AKDI

SEQ ID NO: 96 - protein, 4 aa, ARTIFICIAL SEQUENCE
  Synthetic Construct
AKDL

SEQ ID NO: 97 - protein, 4 aa, ARTIFICIAL SEQUENCE
  Synthetic Construct
AKDN

SEQ ID NO: 98 - protein, 4 aa, ARTIFICIAL SEQUENCE
  Synthetic Construct
AKDQ

SEQ ID NO: 99 - protein, 4 aa, ARTIFICIAL SEQUENCE
  Synthetic Construct
AKDR

SEQ ID NO: 100 - protein, 4 aa, ARTIFICIAL SEQUENCE
  Synthetic Construct
AKDS

SEQ ID NO: 101 - protein, 4 aa, ARTIFICIAL SEQUENCE
  Synthetic Construct
AKDT

SEQ ID NO: 102 - protein, 4 aa, ARTIFICIAL SEQUENCE
  Synthetic Construct
AKDY

SEQ ID NO: 103 - protein, 4 aa, ARTIFICIAL SEQUENCE
  Synthetic Construct
AKEA

SEQ ID NO: 104 - protein, 4 aa, ARTIFICIAL SEQUENCE
  Synthetic Construct
AKED

SEQ ID NO: 105 - protein, 4 aa, ARTIFICIAL SEQUENCE
  Synthetic Construct
AKEE

SEQ ID NO: 106 - protein, 4 aa, ARTIFICIAL SEQUENCE
  Synthetic Construct
AKEF

SEQ ID NO: 107 - protein, 4 aa, ARTIFICIAL SEQUENCE
  Synthetic Construct
AKEG

SEQ ID NO: 108 - protein, 4 aa, ARTIFICIAL SEQUENCE
  Synthetic Construct
AKEH

SEQ ID NO: 109 - protein, 4 aa, ARTIFICIAL SEQUENCE
  Synthetic Construct
AKEI

SEQ ID NO: 110 - protein, 4 aa, ARTIFICIAL SEQUENCE
  Synthetic Construct
AKEL

SEQ ID NO: 111 - protein, 4 aa, ARTIFICIAL SEQUENCE
  Synthetic Construct
AKEN

SEQ ID NO: 112 - protein, 4 aa, ARTIFICIAL SEQUENCE
  Synthetic Construct
AKEQ

SEQ ID NO: 113 - protein, 4 aa, ARTIFICIAL SEQUENCE
  Synthetic Construct
AKER

SEQ ID NO: 114 - protein, 4 aa, ARTIFICIAL SEQUENCE
  Synthetic Construct
AKES

SEQ ID NO: 115 - protein, 4 aa, ARTIFICIAL SEQUENCE
  Synthetic Construct
AKET

SEQ ID NO: 116 - protein, 4 aa, ARTIFICIAL SEQUENCE
  Synthetic Construct
AKEY

SEQ ID NO: 117 - protein, 4 aa, ARTIFICIAL SEQUENCE
  Synthetic Construct
AKFA

SEQ ID NO: 118 - protein, 4 aa, ARTIFICIAL SEQUENCE
  Synthetic Construct
AKFD

SEQ ID NO: 119 - protein, 4 aa, ARTIFICIAL SEQUENCE
  Synthetic Construct
AKFE

SEQ ID NO: 120 - protein, 4 aa, ARTIFICIAL SEQUENCE
  Synthetic Construct
AKFF

SEQ ID NO: 121 - protein, 4 aa, ARTIFICIAL SEQUENCE
  Synthetic Construct
AKFG

SEQ ID NO: 122 - protein, 4 aa, ARTIFICIAL SEQUENCE
  Synthetic Construct
AKFH

SEQ ID NO: 123 - protein, 4 aa, ARTIFICIAL SEQUENCE
  Synthetic Construct
AKFI

SEQ ID NO: 124 - protein, 4 aa, ARTIFICIAL SEQUENCE
  Synthetic Construct
AKFL

SEQ ID NO: 125 - protein, 4 aa, ARTIFICIAL SEQUENCE
  Synthetic Construct
AKFN

SEQ ID NO: 126 - protein, 4 aa, ARTIFICIAL SEQUENCE
  Synthetic Construct
AKFQ

SEQ ID NO: 127 - protein, 4 aa, ARTIFICIAL SEQUENCE
  Synthetic Construct
AKFR

SEQ ID NO: 128 - protein, 4 aa, ARTIFICIAL SEQUENCE
  Synthetic Construct
AKFS

SEQ ID NO: 129 - protein, 4 aa, ARTIFICIAL SEQUENCE
  Synthetic Construct
AKFT

SEQ ID NO: 130 - protein, 4 aa, ARTIFICIAL SEQUENCE
  Synthetic Construct
AKFY

SEQ ID NO: 131 - protein, 4 aa, ARTIFICIAL SEQUENCE
  Synthetic Construct
AKGA

SEQ ID NO: 132 - protein, 4 aa, ARTIFICIAL SEQUENCE
  Synthetic Construct
AKGD

SEQ ID NO: 133 - protein, 4 aa, ARTIFICIAL SEQUENCE
  Synthetic Construct
AKGE

SEQ ID NO: 134 - protein, 4 aa, ARTIFICIAL SEQUENCE
  Synthetic Construct
AKGF

SEQ ID NO: 135 - protein, 4 aa, ARTIFICIAL SEQUENCE
  Synthetic Construct
AKGG

SEQ ID NO: 136 - protein, 4 aa, ARTIFICIAL SEQUENCE
  Synthetic Construct
AKGH

SEQ ID NO: 137 - protein, 4 aa, ARTIFICIAL SEQUENCE
  Synthetic Construct
AKGI

SEQ ID NO: 138 - protein, 4 aa, ARTIFICIAL SEQUENCE
  Synthetic Construct
AKGL

SEQ ID NO: 139 - protein, 4 aa, ARTIFICIAL SEQUENCE
  Synthetic Construct
AKGN

SEQ ID NO: 140 - protein, 4 aa, ARTIFICIAL SEQUENCE
  Synthetic Construct
AKGQ

SEQ ID NO: 141 - protein, 4 aa, ARTIFICIAL SEQUENCE
  Synthetic Construct
AKGR

SEQ ID NO: 142 - protein, 4 aa, ARTIFICIAL SEQUENCE
  Synthetic Construct
AKGS

SEQ ID NO: 143 - protein, 4 aa, ARTIFICIAL SEQUENCE
  Synthetic Construct
AKGT

SEQ ID NO: 144 - protein, 4 aa, ARTIFICIAL SEQUENCE
  Synthetic Construct
AKGY

SEQ ID NO: 145 - protein, 4 aa, ARTIFICIAL SEQUENCE
  Synthetic Construct
AKHA

SEQ ID NO: 146 - protein, 4 aa, ARTIFICIAL SEQUENCE
  Synthetic Construct
AKHD

SEQ ID NO: 147 - protein, 4 aa, ARTIFICIAL SEQUENCE
  Synthetic Construct
AKHE

SEQ ID NO: 148 - protein, 4 aa, ARTIFICIAL SEQUENCE
  Synthetic Construct
AKHF

SEQ ID NO: 149 - protein, 4 aa, ARTIFICIAL SEQUENCE
  Synthetic Construct
AKHG

SEQ ID NO: 150 - protein, 4 aa, ARTIFICIAL SEQUENCE
  Synthetic Construct
AKHH

SEQ ID NO: 151 - protein, 4 aa, ARTIFICIAL SEQUENCE
  Synthetic Construct
AKHI

SEQ ID NO: 152 - protein, 4 aa, ARTIFICIAL SEQUENCE
  Synthetic Construct
AKHL

SEQ ID NO: 153 - protein, 4 aa, ARTIFICIAL SEQUENCE
  Synthetic Construct
AKHN

SEQ ID NO: 154 - protein, 4 aa, ARTIFICIAL SEQUENCE
  Synthetic Construct
AKHQ

SEQ ID NO: 155 - protein, 4 aa, ARTIFICIAL SEQUENCE
  Synthetic Construct
AKHR

SEQ ID NO: 156 - protein, 4 aa, ARTIFICIAL SEQUENCE
  Synthetic Construct
AKHS

SEQ ID NO: 157 - protein, 4 aa, ARTIFICIAL SEQUENCE
  Synthetic Construct
AKHT

SEQ ID NO: 158 - protein, 4 aa, ARTIFICIAL SEQUENCE
  Synthetic Construct
AKHY

SEQ ID NO: 159 - protein, 4 aa, ARTIFICIAL SEQUENCE
  Synthetic Construct
AKIA

SEQ ID NO: 160 - protein, 4 aa, ARTIFICIAL SEQUENCE
  Synthetic Construct
AKID

SEQ ID NO: 161 - protein, 4 aa, ARTIFICIAL SEQUENCE
  Synthetic Construct
AKIE

SEQ ID NO: 162 - protein, 4 aa, ARTIFICIAL SEQUENCE
  Synthetic Construct
AKIF

SEQ ID NO: 163 - protein, 4 aa, ARTIFICIAL SEQUENCE
  Synthetic Construct
AKIG

SEQ ID NO: 164 - protein, 4 aa, ARTIFICIAL SEQUENCE
  Synthetic Construct
AKIH

SEQ ID NO: 165 - protein, 4 aa, ARTIFICIAL SEQUENCE
  Synthetic Construct
AKII

SEQ ID NO: 166 - protein, 4 aa, ARTIFICIAL SEQUENCE
  Synthetic Construct
AKIL

SEQ ID NO: 167 - protein, 4 aa, ARTIFICIAL SEQUENCE
  Synthetic Construct
AKIN

SEQ ID NO: 168 - protein, 4 aa, ARTIFICIAL SEQUENCE
  Synthetic Construct
AKIQ

SEQ ID NO: 169 - protein, 4 aa, ARTIFICIAL SEQUENCE
  Synthetic Construct
AKIR

SEQ ID NO: 170 - protein, 4 aa, ARTIFICIAL SEQUENCE
  Synthetic Construct
AKIS

SEQ ID NO: 171 - protein, 4 aa, ARTIFICIAL SEQUENCE
  Synthetic Construct
AKIT

SEQ ID NO: 172 - protein, 4 aa, ARTIFICIAL SEQUENCE
  Synthetic Construct
AKIY

SEQ ID NO: 173 - protein, 4 aa, ARTIFICIAL SEQUENCE
  Synthetic Construct
AKLA

SEQ ID NO: 174 - protein, 4 aa, ARTIFICIAL SEQUENCE
  Synthetic Construct
AKLD

SEQ ID NO: 175 - protein, 4 aa, ARTIFICIAL SEQUENCE
  Synthetic Construct
AKLE

SEQ ID NO: 176 - protein, 4 aa, ARTIFICIAL SEQUENCE
  Synthetic Construct
AKLF

SEQ ID NO: 177 - protein, 4 aa, ARTIFICIAL SEQUENCE
  Synthetic Construct
AKLG

SEQ ID NO: 178 - protein, 4 aa, ARTIFICIAL SEQUENCE
  Synthetic Construct
AKLH

SEQ ID NO: 179 - protein, 4 aa, ARTIFICIAL SEQUENCE
  Synthetic Construct
AKLI

SEQ ID NO: 180 - protein, 4 aa, ARTIFICIAL SEQUENCE
  Synthetic Construct
AKLL

SEQ ID NO: 181 - protein, 4 aa, ARTIFICIAL SEQUENCE
  Synthetic Construct
AKLN

SEQ ID NO: 182 - protein, 4 aa, ARTIFICIAL SEQUENCE
  Synthetic Construct
AKLQ

SEQ ID NO: 183 - protein, 4 aa, ARTIFICIAL SEQUENCE
  Synthetic Construct
AKLR

SEQ ID NO: 184 - protein, 4 aa, ARTIFICIAL SEQUENCE
  Synthetic Construct
AKLS

SEQ ID NO: 185 - protein, 4 aa, ARTIFICIAL SEQUENCE
  Synthetic Construct
AKLT

SEQ ID NO: 186 - protein, 4 aa, ARTIFICIAL SEQUENCE
  Synthetic Construct
AKLY

SEQ ID NO: 187 - protein, 4 aa, ARTIFICIAL SEQUENCE
  Synthetic Construct
AKNA

SEQ ID NO: 188 - protein, 4 aa, ARTIFICIAL SEQUENCE
  Synthetic Construct
AKND

SEQ ID NO: 189 - protein, 4 aa, ARTIFICIAL SEQUENCE
  Synthetic Construct
AKNE

SEQ ID NO: 190 - protein, 4 aa, ARTIFICIAL SEQUENCE
  Synthetic Construct
AKNF

SEQ ID NO: 191 - protein, 4 aa, ARTIFICIAL SEQUENCE
  Synthetic Construct
AKNG

SEQ ID NO: 192 - protein, 4 aa, ARTIFICIAL SEQUENCE
  Synthetic Construct
AKNH

SEQ ID NO: 193 - protein, 4 aa, ARTIFICIAL SEQUENCE
  Synthetic Construct
AKNI

SEQ ID NO: 194 - protein, 4 aa, ARTIFICIAL SEQUENCE
  Synthetic Construct
AKNL

SEQ ID NO: 195 - protein, 4 aa, ARTIFICIAL SEQUENCE
  Synthetic Construct
AKNN

SEQ ID NO: 196 - protein, 4 aa, ARTIFICIAL SEQUENCE
  Synthetic Construct
AKNQ

SEQ ID NO: 197 - protein, 4 aa, ARTIFICIAL SEQUENCE
  Synthetic Construct
AKNR

SEQ ID NO: 198 - protein, 4 aa, ARTIFICIAL SEQUENCE
  Synthetic Construct
AKNS

SEQ ID NO: 199 - protein, 4 aa, ARTIFICIAL SEQUENCE
  Synthetic Construct
AKNT

SEQ ID NO: 200 - protein, 4 aa, ARTIFICIAL SEQUENCE
  Synthetic Construct
AKNY

SEQ ID NO: 201 - protein, 4 aa, ARTIFICIAL SEQUENCE
  Synthetic Construct
AKPA

SEQ ID NO: 202 - protein, 4 aa, ARTIFICIAL SEQUENCE
  Synthetic Construct
AKPD

SEQ ID NO: 203 - protein, 4 aa, ARTIFICIAL SEQUENCE
  Synthetic Construct
AKPE

SEQ ID NO: 204 - protein, 4 aa, ARTIFICIAL SEQUENCE
  Synthetic Construct
AKPF

SEQ ID NO: 205 - protein, 4 aa, ARTIFICIAL SEQUENCE
  Synthetic Construct
AKPG

SEQ ID NO: 206 - protein, 4 aa, ARTIFICIAL SEQUENCE
  Synthetic Construct
AKPH

SEQ ID NO: 207 - protein, 4 aa, ARTIFICIAL SEQUENCE
  Synthetic Construct
AKPI

SEQ ID NO: 208 - protein, 4 aa, ARTIFICIAL SEQUENCE
  Synthetic Construct
AKPL

SEQ ID NO: 209 - protein, 4 aa, ARTIFICIAL SEQUENCE
  Synthetic Construct
AKPN

SEQ ID NO: 210 - protein, 4 aa, ARTIFICIAL SEQUENCE
  Synthetic Construct
AKPQ

SEQ ID NO: 211 - protein, 4 aa, ARTIFICIAL SEQUENCE
  Synthetic Construct
AKPR

SEQ ID NO: 212 - protein, 4 aa, ARTIFICIAL SEQUENCE
  Synthetic Construct
AKPS

SEQ ID NO: 213 - protein, 4 aa, ARTIFICIAL SEQUENCE
  Synthetic Construct
AKPT

SEQ ID NO: 214 - protein, 4 aa, ARTIFICIAL SEQUENCE
  Synthetic Construct
AKPY

SEQ ID NO: 215 - protein, 4 aa, ARTIFICIAL SEQUENCE
  Synthetic Construct
AKQA

SEQ ID NO: 216 - protein, 4 aa, ARTIFICIAL SEQUENCE
  Synthetic Construct
AKQD

SEQ ID NO: 217 - protein, 4 aa, ARTIFICIAL SEQUENCE
  Synthetic Construct
AKQE

SEQ ID NO: 218 - protein, 4 aa, ARTIFICIAL SEQUENCE
  Synthetic Construct
AKQF

SEQ ID NO: 219 - protein, 4 aa, ARTIFICIAL SEQUENCE
  Synthetic Construct
AKQG

SEQ ID NO: 220 - protein, 4 aa, ARTIFICIAL SEQUENCE
  Synthetic Construct
AKQH

SEQ ID NO: 221 - protein, 4 aa, ARTIFICIAL SEQUENCE
  Synthetic Construct
AKQI

SEQ ID NO: 222 - protein, 4 aa, ARTIFICIAL SEQUENCE
  Synthetic Construct
AKQL

SEQ ID NO: 223 - protein, 4 aa, ARTIFICIAL SEQUENCE
  Synthetic Construct
AKQN

SEQ ID NO: 224 - protein, 4 aa, ARTIFICIAL SEQUENCE
  Synthetic Construct
AKQQ

SEQ ID NO: 225 - protein, 4 aa, ARTIFICIAL SEQUENCE
  Synthetic Construct
AKQR

SEQ ID NO: 226 - protein, 4 aa, ARTIFICIAL SEQUENCE
  Synthetic Construct
AKQS

SEQ ID NO: 227 - protein, 4 aa, ARTIFICIAL SEQUENCE
  Synthetic Construct
AKQT

SEQ ID NO: 228 - protein, 4 aa, ARTIFICIAL SEQUENCE
  Synthetic Construct
AKQY

SEQ ID NO: 229 - protein, 4 aa, ARTIFICIAL SEQUENCE
  Synthetic Construct
AKRA

SEQ ID NO: 230 - protein, 4 aa, ARTIFICIAL SEQUENCE
  Synthetic Construct
AKRD

SEQ ID NO: 231 - protein, 4 aa, ARTIFICIAL SEQUENCE
  Synthetic Construct
AKRE

SEQ ID NO: 232 - protein, 4 aa, ARTIFICIAL SEQUENCE
  Synthetic Construct
AKRF

SEQ ID NO: 233 - protein, 4 aa, ARTIFICIAL SEQUENCE
  Synthetic Construct
AKRG

SEQ ID NO: 234 - protein, 4 aa, ARTIFICIAL SEQUENCE
  Synthetic Construct
AKRH

SEQ ID NO: 235 - protein, 4 aa, ARTIFICIAL SEQUENCE
  Synthetic Construct
AKRI

SEQ ID NO: 236 - protein, 4 aa, ARTIFICIAL SEQUENCE
  Synthetic Construct
AKRL

SEQ ID NO: 237 - protein, 4 aa, ARTIFICIAL SEQUENCE
  Synthetic Construct
AKRN

SEQ ID NO: 238 - protein, 4 aa, ARTIFICIAL SEQUENCE
  Synthetic Construct
AKRQ

SEQ ID NO: 239 - protein, 4 aa, ARTIFICIAL SEQUENCE
  Synthetic Construct
AKRR

SEQ ID NO: 240 - protein, 4 aa, ARTIFICIAL SEQUENCE
  Synthetic Construct
AKRS

SEQ ID NO: 241 - protein, 4 aa, ARTIFICIAL SEQUENCE
  Synthetic Construct
AKRT

SEQ ID NO: 242 - protein, 4 aa, ARTIFICIAL SEQUENCE
  Synthetic Construct
AKRY

SEQ ID NO: 243 - protein, 4 aa, ARTIFICIAL SEQUENCE
  Synthetic Construct
AKSA

SEQ ID NO: 244 - protein, 4 aa, ARTIFICIAL SEQUENCE
  Synthetic Construct
AKSD

SEQ ID NO: 245 - protein, 4 aa, ARTIFICIAL SEQUENCE
  Synthetic Construct
AKSE

SEQ ID NO: 246 - protein, 4 aa, ARTIFICIAL SEQUENCE
  Synthetic Construct
AKSF

SEQ ID NO: 247 - protein, 4 aa, ARTIFICIAL SEQUENCE
  Synthetic Construct
AKSG

SEQ ID NO: 248 - protein, 4 aa, ARTIFICIAL SEQUENCE
  Synthetic Construct
AKSH

SEQ ID NO: 249 - protein, 4 aa, ARTIFICIAL SEQUENCE
  Synthetic Construct
AKSI

SEQ ID NO: 250 - protein, 4 aa, ARTIFICIAL SEQUENCE
  Synthetic Construct
AKSL

SEQ ID NO: 251 - protein, 4 aa, ARTIFICIAL SEQUENCE
  Synthetic Construct
AKSN

SEQ ID NO: 252 - protein, 4 aa, ARTIFICIAL SEQUENCE
  Synthetic Construct
AKSQ

SEQ ID NO: 253 - protein, 4 aa, ARTIFICIAL SEQUENCE
  Synthetic Construct
AKSR

SEQ ID NO: 254 - protein, 4 aa, ARTIFICIAL SEQUENCE
  Synthetic Construct
AKSS

SEQ ID NO: 255 - protein, 4 aa, ARTIFICIAL SEQUENCE
  Synthetic Construct
AKST

SEQ ID NO: 256 - protein, 4 aa, ARTIFICIAL SEQUENCE
  Synthetic Construct
AKSY

SEQ ID NO: 257 - protein, 4 aa, ARTIFICIAL SEQUENCE
  Synthetic Construct
AKTA

SEQ ID NO: 258 - protein, 4 aa, ARTIFICIAL SEQUENCE
  Synthetic Construct
AKTD

SEQ ID NO: 259 - protein, 4 aa, ARTIFICIAL SEQUENCE
  Synthetic Construct
AKTE

SEQ ID NO: 260 - protein, 4 aa, ARTIFICIAL SEQUENCE
  Synthetic Construct
AKTF

SEQ ID NO: 261 - protein, 4 aa, ARTIFICIAL SEQUENCE
  Synthetic Construct
AKTG

SEQ ID NO: 262 - protein, 4 aa, ARTIFICIAL SEQUENCE
  Synthetic Construct
AKTH

SEQ ID NO: 263 - protein, 4 aa, ARTIFICIAL SEQUENCE
  Synthetic Construct
AKTI

SEQ ID NO: 264 - protein, 4 aa, ARTIFICIAL SEQUENCE
  Synthetic Construct
AKTL

SEQ ID NO: 265 - protein, 4 aa, ARTIFICIAL SEQUENCE
  Synthetic Construct
AKTN

SEQ ID NO: 266 - protein, 4 aa, ARTIFICIAL SEQUENCE
  Synthetic Construct
AKTQ

SEQ ID NO: 267 - protein, 4 aa, ARTIFICIAL SEQUENCE
  Synthetic Construct
AKTR

SEQ ID NO: 268 - protein, 4 aa, ARTIFICIAL SEQUENCE
  Synthetic Construct
AKTS

SEQ ID NO: 269 - protein, 4 aa, ARTIFICIAL SEQUENCE
  Synthetic Construct
AKTT

SEQ ID NO: 270 - protein, 4 aa, ARTIFICIAL SEQUENCE
  Synthetic Construct
AKTY

SEQ ID NO: 271 - protein, 4 aa, ARTIFICIAL SEQUENCE
  Synthetic Construct
AKYA

SEQ ID NO: 272 - protein, 4 aa, ARTIFICIAL SEQUENCE
  Synthetic Construct
AKYD

SEQ ID NO: 273 - protein, 4 aa, ARTIFICIAL SEQUENCE
  Synthetic Construct
AKYE

SEQ ID NO: 274 - protein, 4 aa, ARTIFICIAL SEQUENCE
  Synthetic Construct
AKYF

SEQ ID NO: 275 - protein, 4 aa, ARTIFICIAL SEQUENCE
  Synthetic Construct
AKYG

SEQ ID NO: 276 - protein, 4 aa, ARTIFICIAL SEQUENCE
  Synthetic Construct
AKYH

SEQ ID NO: 277 - protein, 4 aa, ARTIFICIAL SEQUENCE
  Synthetic Construct
AKYI

SEQ ID NO: 278 - protein, 4 aa, ARTIFICIAL SEQUENCE
  Synthetic Construct
AKYL

SEQ ID NO: 279 - protein, 4 aa, ARTIFICIAL SEQUENCE
  Synthetic Construct
AKYN

SEQ ID NO: 280 - protein, 4 aa, ARTIFICIAL SEQUENCE
  Synthetic Construct
AKYQ

SEQ ID NO: 281 - protein, 4 aa, ARTIFICIAL SEQUENCE
  Synthetic Construct
AKYR

SEQ ID NO: 282 - protein, 4 aa, ARTIFICIAL SEQUENCE
  Synthetic Construct
AKYS

SEQ ID NO: 283 - protein, 4 aa, ARTIFICIAL SEQUENCE
  Synthetic Construct
AKYT

SEQ ID NO: 284 - protein, 4 aa, ARTIFICIAL SEQUENCE
  Synthetic Construct
AKYY

SEQ ID NO: 285 - protein, 4 aa, ARTIFICIAL SEQUENCE
  Synthetic Construct
DKAA

SEQ ID NO: 286 - protein, 4 aa, ARTIFICIAL SEQUENCE
  Synthetic Construct
DKAD

SEQ ID NO: 287 - protein, 4 aa, ARTIFICIAL SEQUENCE
  Synthetic Construct
DKAE

SEQ ID NO: 288 - protein, 4 aa, ARTIFICIAL SEQUENCE
  Synthetic Construct
DKAF

SEQ ID NO: 289 - protein, 4 aa, ARTIFICIAL SEQUENCE
  Synthetic Construct
DKAG

SEQ ID NO: 290 - protein, 4 aa, ARTIFICIAL SEQUENCE
  Synthetic Construct
DKAH

SEQ ID NO: 291 - protein, 4 aa, ARTIFICIAL SEQUENCE
  Synthetic Construct
DKAI

SEQ ID NO: 292 - protein, 4 aa, ARTIFICIAL SEQUENCE
  Synthetic Construct
DKAL

SEQ ID NO: 293 - protein, 4 aa, ARTIFICIAL SEQUENCE
  Synthetic Construct
DKAN

SEQ ID NO: 294 - protein, 4 aa, ARTIFICIAL SEQUENCE
  Synthetic Construct
DKAQ

SEQ ID NO: 295 - protein, 4 aa, ARTIFICIAL SEQUENCE
  Synthetic Construct
DKAR

SEQ ID NO: 296 - protein, 4 aa, ARTIFICIAL SEQUENCE
  Synthetic Construct
DKAS

SEQ ID NO: 297 - protein, 4 aa, ARTIFICIAL SEQUENCE
  Synthetic Construct
DKAT

SEQ ID NO: 298 - protein, 4 aa, ARTIFICIAL SEQUENCE
  Synthetic Construct
DKAY

SEQ ID NO: 299 - protein, 4 aa, ARTIFICIAL SEQUENCE
  Synthetic Construct
DKDA

SEQ ID NO: 300 - protein, 4 aa, ARTIFICIAL SEQUENCE
  Synthetic Construct
DKDD

SEQ ID NO: 301 - protein, 4 aa, ARTIFICIAL SEQUENCE
  Synthetic Construct
DKDE

SEQ ID NO: 302 - protein, 4 aa, ARTIFICIAL SEQUENCE
  Synthetic Construct
DKDF

SEQ ID NO: 303 - protein, 4 aa, ARTIFICIAL SEQUENCE
  Synthetic Construct
DKDG

SEQ ID NO: 304 - protein, 4 aa, ARTIFICIAL SEQUENCE
  Synthetic Construct
DKDH

SEQ ID NO: 305 - protein, 4 aa, ARTIFICIAL SEQUENCE
  Synthetic Construct
DKDI

SEQ ID NO: 306 - protein, 4 aa, ARTIFICIAL SEQUENCE
  Synthetic Construct
DKDL

SEQ ID NO: 307 - protein, 4 aa, ARTIFICIAL SEQUENCE
  Synthetic Construct
DKDN

SEQ ID NO: 308 - protein, 4 aa, ARTIFICIAL SEQUENCE
  Synthetic Construct
DKDQ

SEQ ID NO: 309 - protein, 4 aa, ARTIFICIAL SEQUENCE
  Synthetic Construct
DKDR

SEQ ID NO: 310 - protein, 4 aa, ARTIFICIAL SEQUENCE
  Synthetic Construct
DKDS

SEQ ID NO: 311 - protein, 4 aa, ARTIFICIAL SEQUENCE
  Synthetic Construct
DKDT

SEQ ID NO: 312 - protein, 4 aa, ARTIFICIAL SEQUENCE
  Synthetic Construct
DKDY

SEQ ID NO: 313 - protein, 4 aa, ARTIFICIAL SEQUENCE
  Synthetic Construct
DKEA

SEQ ID NO: 314 - protein, 4 aa, ARTIFICIAL SEQUENCE
  Synthetic Construct
DKED

SEQ ID NO: 315 - protein, 4 aa, ARTIFICIAL SEQUENCE
  Synthetic Construct
DKEE

SEQ ID NO: 316 - protein, 4 aa, ARTIFICIAL SEQUENCE
  Synthetic Construct
DKEF

SEQ ID NO: 317 - protein, 4 aa, ARTIFICIAL SEQUENCE
  Synthetic Construct
DKEG

SEQ ID NO: 318 - protein, 4 aa, ARTIFICIAL SEQUENCE
  Synthetic Construct
DKEH

SEQ ID NO: 319 - protein, 4 aa, ARTIFICIAL SEQUENCE
  Synthetic Construct
DKEI

SEQ ID NO: 320 - protein, 4 aa, ARTIFICIAL SEQUENCE
  Synthetic Construct
DKEL

SEQ ID NO: 321 - protein, 4 aa, ARTIFICIAL SEQUENCE
  Synthetic Construct
DKEN

SEQ ID NO: 322 - protein, 4 aa, ARTIFICIAL SEQUENCE
  Synthetic Construct
DKEQ

SEQ ID NO: 323 - protein, 4 aa, ARTIFICIAL SEQUENCE
  Synthetic Construct
DKER

SEQ ID NO: 324 - protein, 4 aa, ARTIFICIAL SEQUENCE
  Synthetic Construct
DKES

SEQ ID NO: 325 - protein, 4 aa, ARTIFICIAL SEQUENCE
  Synthetic Construct
DKET

SEQ ID NO: 326 - protein, 4 aa, ARTIFICIAL SEQUENCE
  Synthetic Construct
DKEY

SEQ ID NO: 327 - protein, 4 aa, ARTIFICIAL SEQUENCE
  Synthetic Construct
DKFA

SEQ ID NO: 328 - protein, 4 aa, ARTIFICIAL SEQUENCE
  Synthetic Construct
DKFD

SEQ ID NO: 329 - protein, 4 aa, ARTIFICIAL SEQUENCE
  Synthetic Construct
DKFE

SEQ ID NO: 330 - protein, 4 aa, ARTIFICIAL SEQUENCE
  Synthetic Construct
DKFF

SEQ ID NO: 331 - protein, 4 aa, ARTIFICIAL SEQUENCE
  Synthetic Construct
DKFG

SEQ ID NO: 332 - protein, 4 aa, ARTIFICIAL SEQUENCE
  Synthetic Construct
DKFH

SEQ ID NO: 333 - protein, 4 aa, ARTIFICIAL SEQUENCE
  Synthetic Construct
DKFI

SEQ ID NO: 334 - protein, 4 aa, ARTIFICIAL SEQUENCE
  Synthetic Construct
DKFL

SEQ ID NO: 335 - protein, 4 aa, ARTIFICIAL SEQUENCE
  Synthetic Construct
DKFN

SEQ ID NO: 336 - protein, 4 aa, ARTIFICIAL SEQUENCE
  Synthetic Construct
DKFQ

SEQ ID NO: 337 - protein, 4 aa, ARTIFICIAL SEQUENCE
  Synthetic Construct
DKFR

SEQ ID NO: 338 - protein, 4 aa, ARTIFICIAL SEQUENCE
  Synthetic Construct
DKFS

SEQ ID NO: 339 - protein, 4 aa, ARTIFICIAL SEQUENCE
  Synthetic Construct
DKFT

SEQ ID NO: 340 - protein, 4 aa, ARTIFICIAL SEQUENCE
  Synthetic Construct
DKFY

SEQ ID NO: 341 - protein, 4 aa, ARTIFICIAL SEQUENCE
  Synthetic Construct
DKGA

SEQ ID NO: 342 - protein, 4 aa, ARTIFICIAL SEQUENCE
  Synthetic Construct
DKGD

SEQ ID NO: 343 - protein, 4 aa, ARTIFICIAL SEQUENCE
  Synthetic Construct
DKGE

SEQ ID NO: 344 - protein, 4 aa, ARTIFICIAL SEQUENCE
  Synthetic Construct
DKGF

SEQ ID NO: 345 - protein, 4 aa, ARTIFICIAL SEQUENCE
  Synthetic Construct
DKGG

SEQ ID NO: 346 - protein, 4 aa, ARTIFICIAL SEQUENCE
  Synthetic Construct
DKGH

SEQ ID NO: 347 - protein, 4 aa, ARTIFICIAL SEQUENCE
  Synthetic Construct
DKGI

SEQ ID NO: 348 - protein, 4 aa, ARTIFICIAL SEQUENCE
  Synthetic Construct
DKGL

SEQ ID NO: 349 - protein, 4 aa, ARTIFICIAL SEQUENCE
  Synthetic Construct
DKGN

SEQ ID NO: 350 - protein, 4 aa, ARTIFICIAL SEQUENCE
  Synthetic Construct
DKGQ

SEQ ID NO: 351 - protein, 4 aa, ARTIFICIAL SEQUENCE
  Synthetic Construct
DKGR

SEQ ID NO: 352 - protein, 4 aa, ARTIFICIAL SEQUENCE
  Synthetic Construct
DKGS

SEQ ID NO: 353 - protein, 4 aa, ARTIFICIAL SEQUENCE
  Synthetic Construct
DKGT

SEQ ID NO: 354 - protein, 4 aa, ARTIFICIAL SEQUENCE
  Synthetic Construct
DKGY

SEQ ID NO: 355 - protein, 4 aa, ARTIFICIAL SEQUENCE
  Synthetic Construct
DKHA

SEQ ID NO: 356 - protein, 4 aa, ARTIFICIAL SEQUENCE
  Synthetic Construct
DKHD

SEQ ID NO: 357 - protein, 4 aa, ARTIFICIAL SEQUENCE
  Synthetic Construct
DKHE

SEQ ID NO: 358 - protein, 4 aa, ARTIFICIAL SEQUENCE
  Synthetic Construct
DKHF

SEQ ID NO: 359 - protein, 4 aa, ARTIFICIAL SEQUENCE
  Synthetic Construct
DKHG

SEQ ID NO: 360 - protein, 4 aa, ARTIFICIAL SEQUENCE
  Synthetic Construct
DKHH

SEQ ID NO: 361 - protein, 4 aa, ARTIFICIAL SEQUENCE
  Synthetic Construct
DKHI

SEQ ID NO: 362 - protein, 4 aa, ARTIFICIAL SEQUENCE
  Synthetic Construct
DKHL

SEQ ID NO: 363 - protein, 4 aa, ARTIFICIAL SEQUENCE
  Synthetic Construct
DKHN

SEQ ID NO: 364 - protein, 4 aa, ARTIFICIAL SEQUENCE
  Synthetic Construct
DKHQ

SEQ ID NO: 365 - protein, 4 aa, ARTIFICIAL SEQUENCE
  Synthetic Construct
DKHR

SEQ ID NO: 366 - protein, 4 aa, ARTIFICIAL SEQUENCE
  Synthetic Construct
DKHS

SEQ ID NO: 367 - protein, 4 aa, ARTIFICIAL SEQUENCE
  Synthetic Construct
DKHT

SEQ ID NO: 368 - protein, 4 aa, ARTIFICIAL SEQUENCE
  Synthetic Construct
DKHY

SEQ ID NO: 369 - protein, 4 aa, ARTIFICIAL SEQUENCE
  Synthetic Construct
DKIA

SEQ ID NO: 370 - protein, 4 aa, ARTIFICIAL SEQUENCE
  Synthetic Construct
DKID

SEQ ID NO: 371 - protein, 4 aa, ARTIFICIAL SEQUENCE
  Synthetic Construct
DKIE

SEQ ID NO: 372 - protein, 4 aa, ARTIFICIAL SEQUENCE
  Synthetic Construct
DKIF

SEQ ID NO: 373 - protein, 4 aa, ARTIFICIAL SEQUENCE
  Synthetic Construct
DKIG

SEQ ID NO: 374 - protein, 4 aa, ARTIFICIAL SEQUENCE
  Synthetic Construct
DKIH

SEQ ID NO: 375 - protein, 4 aa, ARTIFICIAL SEQUENCE
  Synthetic Construct
DKII

SEQ ID NO: 376 - protein, 4 aa, ARTIFICIAL SEQUENCE
  Synthetic Construct
DKIL

SEQ ID NO: 377 - protein, 4 aa, ARTIFICIAL SEQUENCE
  Synthetic Construct
DKIN

SEQ ID NO: 378 - protein, 4 aa, ARTIFICIAL SEQUENCE
  Synthetic Construct
DKIQ

SEQ ID NO: 379 - protein, 4 aa, ARTIFICIAL SEQUENCE
  Synthetic Construct
DKIR

SEQ ID NO: 380 - protein, 4 aa, ARTIFICIAL SEQUENCE
  Synthetic Construct
DKIS

SEQ ID NO: 381 - protein, 4 aa, ARTIFICIAL SEQUENCE
  Synthetic Construct
DKIT

SEQ ID NO: 382 - protein, 4 aa, ARTIFICIAL SEQUENCE
  Synthetic Construct
DKIY

SEQ ID NO: 383 - protein, 4 aa, ARTIFICIAL SEQUENCE
  Synthetic Construct
DKLA

SEQ ID NO: 384 - protein, 4 aa, ARTIFICIAL SEQUENCE
  Synthetic Construct
DKLD

SEQ ID NO: 385 - protein, 4 aa, ARTIFICIAL SEQUENCE
  Synthetic Construct
DKLE

SEQ ID NO: 386 - protein, 4 aa, ARTIFICIAL SEQUENCE
  Synthetic Construct
DKLF

SEQ ID NO: 387 - protein, 4 aa, ARTIFICIAL SEQUENCE
  Synthetic Construct
DKLG

SEQ ID NO: 388 - protein, 4 aa, ARTIFICIAL SEQUENCE
  Synthetic Construct
DKLH

SEQ ID NO: 389 - protein, 4 aa, ARTIFICIAL SEQUENCE
  Synthetic Construct
DKLI

SEQ ID NO: 390 - protein, 4 aa, ARTIFICIAL SEQUENCE
  Synthetic Construct
DKLL

SEQ ID NO: 391 - protein, 4 aa, ARTIFICIAL SEQUENCE
  Synthetic Construct
DKLN

SEQ ID NO: 392 - protein, 4 aa, ARTIFICIAL SEQUENCE
  Synthetic Construct
DKLQ

SEQ ID NO: 393 - protein, 4 aa, ARTIFICIAL SEQUENCE
  Synthetic Construct
DKLR

SEQ ID NO: 394 - protein, 4 aa, ARTIFICIAL SEQUENCE
  Synthetic Construct
DKLS

SEQ ID NO: 395 - protein, 4 aa, ARTIFICIAL SEQUENCE
  Synthetic Construct
DKLT

SEQ ID NO: 396 - protein, 4 aa, ARTIFICIAL SEQUENCE
  Synthetic Construct
DKLY

SEQ ID NO: 397 - protein, 4 aa, ARTIFICIAL SEQUENCE
  Synthetic Construct
DKNA

SEQ ID NO: 398 - protein, 4 aa, ARTIFICIAL SEQUENCE
  Synthetic Construct
DKND

SEQ ID NO: 399 - protein, 4 aa, ARTIFICIAL SEQUENCE
  Synthetic Construct
DKNE

SEQ ID NO: 400 - protein, 4 aa, ARTIFICIAL SEQUENCE
  Synthetic Construct
DKNF

SEQ ID NO: 401 - protein, 4 aa, ARTIFICIAL SEQUENCE
  Synthetic Construct
DKNG

SEQ ID NO: 402 - protein, 4 aa, ARTIFICIAL SEQUENCE
  Synthetic Construct
DKNH

SEQ ID NO: 403 - protein, 4 aa, ARTIFICIAL SEQUENCE
  Synthetic Construct
DKNI

SEQ ID NO: 404 - protein, 4 aa, ARTIFICIAL SEQUENCE
  Synthetic Construct
DKNL

SEQ ID NO: 405 - protein, 4 aa, ARTIFICIAL SEQUENCE
  Synthetic Construct
DKNN

SEQ ID NO: 406 - protein, 4 aa, ARTIFICIAL SEQUENCE
  Synthetic Construct
DKNQ

SEQ ID NO: 407 - protein, 4 aa, ARTIFICIAL SEQUENCE
  Synthetic Construct
DKNR

SEQ ID NO: 408 - protein, 4 aa, ARTIFICIAL SEQUENCE
  Synthetic Construct
DKNS

SEQ ID NO: 409 - protein, 4 aa, ARTIFICIAL SEQUENCE
  Synthetic Construct
DKNT

SEQ ID NO: 410 - protein, 4 aa, ARTIFICIAL SEQUENCE
  Synthetic Construct
DKNY

SEQ ID NO: 411 - protein, 4 aa, ARTIFICIAL SEQUENCE
  Synthetic Construct
DKPA

SEQ ID NO: 412 - protein, 4 aa, ARTIFICIAL SEQUENCE
  Synthetic Construct
DKPD

SEQ ID NO: 413 - protein, 4 aa, ARTIFICIAL SEQUENCE
  Synthetic Construct
DKPE

SEQ ID NO: 414 - protein, 4 aa, ARTIFICIAL SEQUENCE
  Synthetic Construct
DKPF

SEQ ID NO: 415 - protein, 4 aa, ARTIFICIAL SEQUENCE
  Synthetic Construct
DKPG

SEQ ID NO: 416 - protein, 4 aa, ARTIFICIAL SEQUENCE
  Synthetic Construct
DKPH

SEQ ID NO: 417 - protein, 4 aa, ARTIFICIAL SEQUENCE
  Synthetic Construct
DKPI

SEQ ID NO: 418 - protein, 4 aa, ARTIFICIAL SEQUENCE
  Synthetic Construct
DKPL

SEQ ID NO: 419 - protein, 4 aa, ARTIFICIAL SEQUENCE
  Synthetic Construct
DKPN

SEQ ID NO: 420 - protein, 4 aa, ARTIFICIAL SEQUENCE
  Synthetic Construct
DKPQ

SEQ ID NO: 421 - protein, 4 aa, ARTIFICIAL SEQUENCE
  Synthetic Construct
DKPR

SEQ ID NO: 422 - protein, 4 aa, ARTIFICIAL SEQUENCE
  Synthetic Construct
DKPS

SEQ ID NO: 423 - protein, 4 aa, ARTIFICIAL SEQUENCE
  Synthetic Construct
DKPT

SEQ ID NO: 424 - protein, 4 aa, ARTIFICIAL SEQUENCE
  Synthetic Construct
DKPY

SEQ ID NO: 425 - protein, 4 aa, ARTIFICIAL SEQUENCE
  Synthetic Construct
DKQA

SEQ ID NO: 426 - protein, 4 aa, ARTIFICIAL SEQUENCE
  Synthetic Construct
DKQD

SEQ ID NO: 427 - protein, 4 aa, ARTIFICIAL SEQUENCE
  Synthetic Construct
DKQE

SEQ ID NO: 428 - protein, 4 aa, ARTIFICIAL SEQUENCE
  Synthetic Construct
DKQF

SEQ ID NO: 429 - protein, 4 aa, ARTIFICIAL SEQUENCE
  Synthetic Construct
DKQG

SEQ ID NO: 430 - protein, 4 aa, ARTIFICIAL SEQUENCE
  Synthetic Construct
DKQH

SEQ ID NO: 431 - protein, 4 aa, ARTIFICIAL SEQUENCE
  Synthetic Construct
DKQI

SEQ ID NO: 432 - protein, 4 aa, ARTIFICIAL SEQUENCE
  Synthetic Construct
DKQL

SEQ ID NO: 433 - protein, 4 aa, ARTIFICIAL SEQUENCE
  Synthetic Construct
DKQN

SEQ ID NO: 434 - protein, 4 aa, ARTIFICIAL SEQUENCE
  Synthetic Construct
DKQQ

SEQ ID NO: 435 - protein, 4 aa, ARTIFICIAL SEQUENCE
  Synthetic Construct
DKQR

SEQ ID NO: 436 - protein, 4 aa, ARTIFICIAL SEQUENCE
  Synthetic Construct
DKQS

SEQ ID NO: 437 - protein, 4 aa, ARTIFICIAL SEQUENCE
  Synthetic Construct
DKQT

SEQ ID NO: 438 - protein, 4 aa, ARTIFICIAL SEQUENCE
  Synthetic Construct
DKQY

SEQ ID NO: 439 - protein, 4 aa, ARTIFICIAL SEQUENCE
  Synthetic Construct
DKRA

SEQ ID NO: 440 - protein, 4 aa, ARTIFICIAL SEQUENCE
  Synthetic Construct
DKRD

SEQ ID NO: 441 - protein, 4 aa, ARTIFICIAL SEQUENCE
  Synthetic Construct
DKRE

SEQ ID NO: 442 - protein, 4 aa, ARTIFICIAL SEQUENCE
  Synthetic Construct
DKRF

SEQ ID NO: 443 - protein, 4 aa, ARTIFICIAL SEQUENCE
  Synthetic Construct
DKRG

SEQ ID NO: 444 - protein, 4 aa, ARTIFICIAL SEQUENCE
  Synthetic Construct
DKRH

SEQ ID NO: 445 - protein, 4 aa, ARTIFICIAL SEQUENCE
  Synthetic Construct
DKRI

SEQ ID NO: 446 - protein, 4 aa, ARTIFICIAL SEQUENCE
  Synthetic Construct
DKRL

SEQ ID NO: 447 - protein, 4 aa, ARTIFICIAL SEQUENCE
  Synthetic Construct
DKRN

SEQ ID NO: 448 - protein, 4 aa, ARTIFICIAL SEQUENCE
  Synthetic Construct
DKRQ

SEQ ID NO: 449 - protein, 4 aa, ARTIFICIAL SEQUENCE
  Synthetic Construct
DKRR

SEQ ID NO: 450 - protein, 4 aa, ARTIFICIAL SEQUENCE
  Synthetic Construct
DKRS

SEQ ID NO: 451 - protein, 4 aa, ARTIFICIAL SEQUENCE
  Synthetic Construct
DKRT

SEQ ID NO: 452 - protein, 4 aa, ARTIFICIAL SEQUENCE
  Synthetic Construct
DKRY

SEQ ID NO: 453 - protein, 4 aa, ARTIFICIAL SEQUENCE
  Synthetic Construct
DKSA

SEQ ID NO: 454 - protein, 4 aa, ARTIFICIAL SEQUENCE
  Synthetic Construct
DKSD

SEQ ID NO: 455 - protein, 4 aa, ARTIFICIAL SEQUENCE
  Synthetic Construct
DKSE

SEQ ID NO: 456 - protein, 4 aa, ARTIFICIAL SEQUENCE
  Synthetic Construct
DKSF

SEQ ID NO: 457 - protein, 4 aa, ARTIFICIAL SEQUENCE
  Synthetic Construct
DKSG

SEQ ID NO: 458 - protein, 4 aa, ARTIFICIAL SEQUENCE
  Synthetic Construct
DKSH

SEQ ID NO: 459 - protein, 4 aa, ARTIFICIAL SEQUENCE
  Synthetic Construct
DKSI

SEQ ID NO: 460 - protein, 4 aa, ARTIFICIAL SEQUENCE
  Synthetic Construct
DKSL

SEQ ID NO: 461 - protein, 4 aa, ARTIFICIAL SEQUENCE
  Synthetic Construct
DKSN

SEQ ID NO: 462 - protein, 4 aa, ARTIFICIAL SEQUENCE
  Synthetic Construct
DKSQ

SEQ ID NO: 463 - protein, 4 aa, ARTIFICIAL SEQUENCE
  Synthetic Construct
DKSR

SEQ ID NO: 464 - protein, 4 aa, ARTIFICIAL SEQUENCE
  Synthetic Construct
DKSS

SEQ ID NO: 465 - protein, 4 aa, ARTIFICIAL SEQUENCE
  Synthetic Construct
DKST

SEQ ID NO: 466 - protein, 4 aa, ARTIFICIAL SEQUENCE
  Synthetic Construct
DKSY

SEQ ID NO: 467 - protein, 4 aa, ARTIFICIAL SEQUENCE
  Synthetic Construct
DKTA

SEQ ID NO: 468 - protein, 4 aa, ARTIFICIAL SEQUENCE
  Synthetic Construct
DKTD

SEQ ID NO: 469 - protein, 4 aa, ARTIFICIAL SEQUENCE
  Synthetic Construct
DKTE

SEQ ID NO: 470 - protein, 4 aa, ARTIFICIAL SEQUENCE
  Synthetic Construct
DKTF

SEQ ID NO: 471 - protein, 4 aa, ARTIFICIAL SEQUENCE
  Synthetic Construct
DKTG

SEQ ID NO: 472 - protein, 4 aa, ARTIFICIAL SEQUENCE
  Synthetic Construct
DKTH

SEQ ID NO: 473 - protein, 4 aa, ARTIFICIAL SEQUENCE
  Synthetic Construct
DKTI

SEQ ID NO: 474 - protein, 4 aa, ARTIFICIAL SEQUENCE
  Synthetic Construct
DKTL

SEQ ID NO: 475 - protein, 4 aa, ARTIFICIAL SEQUENCE
  Synthetic Construct
DKTN

SEQ ID NO: 476 - protein, 4 aa, ARTIFICIAL SEQUENCE
  Synthetic Construct
DKTQ

SEQ ID NO: 477 - protein, 4 aa, ARTIFICIAL SEQUENCE
  Synthetic Construct
DKTR

SEQ ID NO: 478 - protein, 4 aa, ARTIFICIAL SEQUENCE
  Synthetic Construct
DKTS

SEQ ID NO: 479 - protein, 4 aa, ARTIFICIAL SEQUENCE
  Synthetic Construct
DKTT

SEQ ID NO: 480 - protein, 4 aa, ARTIFICIAL SEQUENCE
  Synthetic Construct
DKTY

SEQ ID NO: 481 - protein, 4 aa, ARTIFICIAL SEQUENCE
  Synthetic Construct
DKYA

SEQ ID NO: 482 - protein, 4 aa, ARTIFICIAL SEQUENCE
  Synthetic Construct
DKYD

SEQ ID NO: 483 - protein, 4 aa, ARTIFICIAL SEQUENCE
  Synthetic Construct
DKYE

SEQ ID NO: 484 - protein, 4 aa, ARTIFICIAL SEQUENCE
  Synthetic Construct
DKYF

SEQ ID NO: 485 - protein, 4 aa, ARTIFICIAL SEQUENCE
  Synthetic Construct
DKYG

SEQ ID NO: 486 - protein, 4 aa, ARTIFICIAL SEQUENCE
  Synthetic Construct
DKYH

SEQ ID NO: 487 - protein, 4 aa, ARTIFICIAL SEQUENCE
  Synthetic Construct
DKYI

SEQ ID NO: 488 - protein, 4 aa, ARTIFICIAL SEQUENCE
  Synthetic Construct
DKYL

SEQ ID NO: 489 - protein, 4 aa, ARTIFICIAL SEQUENCE
  Synthetic Construct
DKYN

SEQ ID NO: 490 - protein, 4 aa, ARTIFICIAL SEQUENCE
  Synthetic Construct
DKYQ

SEQ ID NO: 491 - protein, 4 aa, ARTIFICIAL SEQUENCE
  Synthetic Construct
DKYR

SEQ ID NO: 492 - protein, 4 aa, ARTIFICIAL SEQUENCE
  Synthetic Construct
DKYS

SEQ ID NO: 493 - protein, 4 aa, ARTIFICIAL SEQUENCE
  Synthetic Construct
DKYT

SEQ ID NO: 494 - protein, 4 aa, ARTIFICIAL SEQUENCE
  Synthetic Construct
DKYY

SEQ ID NO: 495 - protein, 4 aa, ARTIFICIAL SEQUENCE
  Synthetic Construct
EKAA

SEQ ID NO: 496 - protein, 4 aa, ARTIFICIAL SEQUENCE
  Synthetic Construct
EKAD

SEQ ID NO: 497 - protein, 4 aa, ARTIFICIAL SEQUENCE
  Synthetic Construct
EKAE

SEQ ID NO: 498 - protein, 4 aa, ARTIFICIAL SEQUENCE
  Synthetic Construct
EKAF

SEQ ID NO: 499 - protein, 4 aa, ARTIFICIAL SEQUENCE
  Synthetic Construct
EKAG

SEQ ID NO: 500 - protein, 4 aa, ARTIFICIAL SEQUENCE
  Synthetic Construct
EKAH

SEQ ID NO: 501 - protein, 4 aa, ARTIFICIAL SEQUENCE
  Synthetic Construct
EKAI

SEQ ID NO: 502 - protein, 4 aa, ARTIFICIAL SEQUENCE
  Synthetic Construct
EKAL

SEQ ID NO: 503 - protein, 4 aa, ARTIFICIAL SEQUENCE
  Synthetic Construct
EKAN

SEQ ID NO: 504 - protein, 4 aa, ARTIFICIAL SEQUENCE
  Synthetic Construct
EKAQ

SEQ ID NO: 505 - protein, 4 aa, ARTIFICIAL SEQUENCE
  Synthetic Construct
EKAR

SEQ ID NO: 506 - protein, 4 aa, ARTIFICIAL SEQUENCE
  Synthetic Construct
EKAS

SEQ ID NO: 507 - protein, 4 aa, ARTIFICIAL SEQUENCE
  Synthetic Construct
EKAT

SEQ ID NO: 508 - protein, 4 aa, ARTIFICIAL SEQUENCE
  Synthetic Construct
EKAY

SEQ ID NO: 509 - protein, 4 aa, ARTIFICIAL SEQUENCE
  Synthetic Construct
EKDA

SEQ ID NO: 510 - protein, 4 aa, ARTIFICIAL SEQUENCE
  Synthetic Construct
EKDD

SEQ ID NO: 511 - protein, 4 aa, ARTIFICIAL SEQUENCE
  Synthetic Construct
EKDE

SEQ ID NO: 512 - protein, 4 aa, ARTIFICIAL SEQUENCE
  Synthetic Construct
EKDF

SEQ ID NO: 513 - protein, 4 aa, ARTIFICIAL SEQUENCE
  Synthetic Construct
EKDG

SEQ ID NO: 514 - protein, 4 aa, ARTIFICIAL SEQUENCE
  Synthetic Construct
EKDH

SEQ ID NO: 515 - protein, 4 aa, ARTIFICIAL SEQUENCE
  Synthetic Construct
EKDI

SEQ ID NO: 516 - protein, 4 aa, ARTIFICIAL SEQUENCE
  Synthetic Construct
EKDL

SEQ ID NO: 517 - protein, 4 aa, ARTIFICIAL SEQUENCE
  Synthetic Construct
EKDN

SEQ ID NO: 518 - protein, 4 aa, ARTIFICIAL SEQUENCE
  Synthetic Construct
EKDQ

SEQ ID NO: 519 - protein, 4 aa, ARTIFICIAL SEQUENCE
  Synthetic Construct
EKDR

SEQ ID NO: 520 - protein, 4 aa, ARTIFICIAL SEQUENCE
  Synthetic Construct
EKDS

SEQ ID NO: 521 - protein, 4 aa, ARTIFICIAL SEQUENCE
  Synthetic Construct
EKDT

SEQ ID NO: 522 - protein, 4 aa, ARTIFICIAL SEQUENCE
  Synthetic Construct
EKDY

SEQ ID NO: 523 - protein, 4 aa, ARTIFICIAL SEQUENCE
  Synthetic Construct
EKEA

SEQ ID NO: 524 - protein, 4 aa, ARTIFICIAL SEQUENCE
  Synthetic Construct
EKED

SEQ ID NO: 525 - protein, 4 aa, ARTIFICIAL SEQUENCE
  Synthetic Construct
EKEE

SEQ ID NO: 526 - protein, 4 aa, ARTIFICIAL SEQUENCE
  Synthetic Construct
EKEF

SEQ ID NO: 527 - protein, 4 aa, ARTIFICIAL SEQUENCE
  Synthetic Construct
EKEG

SEQ ID NO: 528 - protein, 4 aa, ARTIFICIAL SEQUENCE
  Synthetic Construct
EKEH

SEQ ID NO: 529 - protein, 4 aa, ARTIFICIAL SEQUENCE
  Synthetic Construct
EKEI

SEQ ID NO: 530 - protein, 4 aa, ARTIFICIAL SEQUENCE
  Synthetic Construct
EKEL

SEQ ID NO: 531 - protein, 4 aa, ARTIFICIAL SEQUENCE
  Synthetic Construct
EKEN

SEQ ID NO: 532 - protein, 4 aa, ARTIFICIAL SEQUENCE
  Synthetic Construct
EKEQ

SEQ ID NO: 533 - protein, 4 aa, ARTIFICIAL SEQUENCE
  Synthetic Construct
EKER

SEQ ID NO: 534 - protein, 4 aa, ARTIFICIAL SEQUENCE
  Synthetic Construct
EKES

SEQ ID NO: 535 - protein, 4 aa, ARTIFICIAL SEQUENCE
  Synthetic Construct
EKET

SEQ ID NO: 536 - protein, 4 aa, ARTIFICIAL SEQUENCE
  Synthetic Construct
EKEY

SEQ ID NO: 537 - protein, 4 aa, ARTIFICIAL SEQUENCE
  Synthetic Construct
EKFA

SEQ ID NO: 538 - protein, 4 aa, ARTIFICIAL SEQUENCE
  Synthetic Construct
EKFD

SEQ ID NO: 539 - protein, 4 aa, ARTIFICIAL SEQUENCE
  Synthetic Construct
EKFE

SEQ ID NO: 540 - protein, 4 aa, ARTIFICIAL SEQUENCE
  Synthetic Construct
EKFF

SEQ ID NO: 541 - protein, 4 aa, ARTIFICIAL SEQUENCE
  Synthetic Construct
EKFG

SEQ ID NO: 542 - protein, 4 aa, ARTIFICIAL SEQUENCE
  Synthetic Construct
EKFH

SEQ ID NO: 543 - protein, 4 aa, ARTIFICIAL SEQUENCE
  Synthetic Construct
EKFI

SEQ ID NO: 544 - protein, 4 aa, ARTIFICIAL SEQUENCE
  Synthetic Construct
EKFL

SEQ ID NO: 545 - protein, 4 aa, ARTIFICIAL SEQUENCE
  Synthetic Construct
EKFN

SEQ ID NO: 546 - protein, 4 aa, ARTIFICIAL SEQUENCE
  Synthetic Construct
EKFQ

SEQ ID NO: 547 - protein, 4 aa, ARTIFICIAL SEQUENCE
  Synthetic Construct
EKFR

SEQ ID NO: 548 - protein, 4 aa, ARTIFICIAL SEQUENCE
  Synthetic Construct
EKFS

SEQ ID NO: 549 - protein, 4 aa, ARTIFICIAL SEQUENCE
  Synthetic Construct
EKFT

SEQ ID NO: 550 - protein, 4 aa, ARTIFICIAL SEQUENCE
  Synthetic Construct
EKFY

SEQ ID NO: 551 - protein, 4 aa, ARTIFICIAL SEQUENCE
  Synthetic Construct
EKGA

SEQ ID NO: 552 - protein, 4 aa, ARTIFICIAL SEQUENCE
  Synthetic Construct
EKGD

SEQ ID NO: 553 - protein, 4 aa, ARTIFICIAL SEQUENCE
  Synthetic Construct
EKGE

SEQ ID NO: 554 - protein, 4 aa, ARTIFICIAL SEQUENCE
  Synthetic Construct
EKGF

SEQ ID NO: 555 - protein, 4 aa, ARTIFICIAL SEQUENCE
  Synthetic Construct
EKGG

SEQ ID NO: 556 - protein, 4 aa, ARTIFICIAL SEQUENCE
  Synthetic Construct
EKGH

SEQ ID NO: 557 - protein, 4 aa, ARTIFICIAL SEQUENCE
  Synthetic Construct
EKGI

SEQ ID NO: 558 - protein, 4 aa, ARTIFICIAL SEQUENCE
  Synthetic Construct
EKGL

SEQ ID NO: 559 - protein, 4 aa, ARTIFICIAL SEQUENCE
  Synthetic Construct
EKGN

SEQ ID NO: 560 - protein, 4 aa, ARTIFICIAL SEQUENCE
  Synthetic Construct
EKGQ

SEQ ID NO: 561 - protein, 4 aa, ARTIFICIAL SEQUENCE
  Synthetic Construct
EKGR

SEQ ID NO: 562 - protein, 4 aa, ARTIFICIAL SEQUENCE
  Synthetic Construct
EKGS

SEQ ID NO: 563 - protein, 4 aa, ARTIFICIAL SEQUENCE
  Synthetic Construct
EKGT

SEQ ID NO: 564 - protein, 4 aa, ARTIFICIAL SEQUENCE
  Synthetic Construct
EKGY

SEQ ID NO: 565 - protein, 4 aa, ARTIFICIAL SEQUENCE
  Synthetic Construct
EKHA

SEQ ID NO: 566 - protein, 4 aa, ARTIFICIAL SEQUENCE
  Synthetic Construct
EKHD

SEQ ID NO: 567 - protein, 4 aa, ARTIFICIAL SEQUENCE
  Synthetic Construct
EKHE

SEQ ID NO: 568 - protein, 4 aa, ARTIFICIAL SEQUENCE
  Synthetic Construct
EKHF

SEQ ID NO: 569 - protein, 4 aa, ARTIFICIAL SEQUENCE
  Synthetic Construct
EKHG

SEQ ID NO: 570 - protein, 4 aa, ARTIFICIAL SEQUENCE
  Synthetic Construct
EKHH

SEQ ID NO: 571 - protein, 4 aa, ARTIFICIAL SEQUENCE
  Synthetic Construct
EKHI

SEQ ID NO: 572 - protein, 4 aa, ARTIFICIAL SEQUENCE
  Synthetic Construct
EKHL

SEQ ID NO: 573 - protein, 4 aa, ARTIFICIAL SEQUENCE
  Synthetic Construct
EKHN

SEQ ID NO: 574 - protein, 4 aa, ARTIFICIAL SEQUENCE
  Synthetic Construct
EKHQ

SEQ ID NO: 575 - protein, 4 aa, ARTIFICIAL SEQUENCE
  Synthetic Construct
EKHR

SEQ ID NO: 576 - protein, 4 aa, ARTIFICIAL SEQUENCE
  Synthetic Construct
EKHS

SEQ ID NO: 577 - protein, 4 aa, ARTIFICIAL SEQUENCE
  Synthetic Construct
EKHT

SEQ ID NO: 578 - protein, 4 aa, ARTIFICIAL SEQUENCE
  Synthetic Construct
EKHY

SEQ ID NO: 579 - protein, 4 aa, ARTIFICIAL SEQUENCE
  Synthetic Construct
EKIA

SEQ ID NO: 580 - protein, 4 aa, ARTIFICIAL SEQUENCE
  Synthetic Construct
EKID

SEQ ID NO: 581 - protein, 4 aa, ARTIFICIAL SEQUENCE
  Synthetic Construct
EKIE

SEQ ID NO: 582 - protein, 4 aa, ARTIFICIAL SEQUENCE
  Synthetic Construct
EKIF

SEQ ID NO: 583 - protein, 4 aa, ARTIFICIAL SEQUENCE
  Synthetic Construct
EKIG

SEQ ID NO: 584 - protein, 4 aa, ARTIFICIAL SEQUENCE
  Synthetic Construct
EKIH

SEQ ID NO: 585 - protein, 4 aa, ARTIFICIAL SEQUENCE
  Synthetic Construct
EKII

SEQ ID NO: 586 - protein, 4 aa, ARTIFICIAL SEQUENCE
  Synthetic Construct
EKIL

SEQ ID NO: 587 - protein, 4 aa, ARTIFICIAL SEQUENCE
  Synthetic Construct
EKIN

SEQ ID NO: 588 - protein, 4 aa, ARTIFICIAL SEQUENCE
  Synthetic Construct
EKIQ

SEQ ID NO: 589 - protein, 4 aa, ARTIFICIAL SEQUENCE
  Synthetic Construct
EKIR

SEQ ID NO: 590 - protein, 4 aa, ARTIFICIAL SEQUENCE
  Synthetic Construct
EKIS

SEQ ID NO: 591 - protein, 4 aa, ARTIFICIAL SEQUENCE
  Synthetic Construct
EKIT

SEQ ID NO: 592 - protein, 4 aa, ARTIFICIAL SEQUENCE
  Synthetic Construct
EKIY

SEQ ID NO: 593 - protein, 4 aa, ARTIFICIAL SEQUENCE
  Synthetic Construct
EKLA

SEQ ID NO: 594 - protein, 4 aa, ARTIFICIAL SEQUENCE
  Synthetic Construct
EKLD

SEQ ID NO: 595 - protein, 4 aa, ARTIFICIAL SEQUENCE
  Synthetic Construct
EKLE

SEQ ID NO: 596 - protein, 4 aa, ARTIFICIAL SEQUENCE
  Synthetic Construct
EKLF

SEQ ID NO: 597 - protein, 4 aa, ARTIFICIAL SEQUENCE
  Synthetic Construct
EKLG

SEQ ID NO: 598 - protein, 4 aa, ARTIFICIAL SEQUENCE
  Synthetic Construct
EKLH

SEQ ID NO: 599 - protein, 4 aa, ARTIFICIAL SEQUENCE
  Synthetic Construct
EKLI

SEQ ID NO: 600 - protein, 4 aa, ARTIFICIAL SEQUENCE
  Synthetic Construct
EKLL

SEQ ID NO: 601 - protein, 4 aa, ARTIFICIAL SEQUENCE
  Synthetic Construct
EKLN

SEQ ID NO: 602 - protein, 4 aa, ARTIFICIAL SEQUENCE
  Synthetic Construct
EKLQ

SEQ ID NO: 603 - protein, 4 aa, ARTIFICIAL SEQUENCE
  Synthetic Construct
EKLR

SEQ ID NO: 604 - protein, 4 aa, ARTIFICIAL SEQUENCE
  Synthetic Construct
EKLS

SEQ ID NO: 605 - protein, 4 aa, ARTIFICIAL SEQUENCE
  Synthetic Construct
EKLT

SEQ ID NO: 606 - protein, 4 aa, ARTIFICIAL SEQUENCE
  Synthetic Construct
EKLY

SEQ ID NO: 607 - protein, 4 aa, ARTIFICIAL SEQUENCE
  Synthetic Construct
EKNA

SEQ ID NO: 608 - protein, 4 aa, ARTIFICIAL SEQUENCE
  Synthetic Construct
EKND

SEQ ID NO: 609 - protein, 4 aa, ARTIFICIAL SEQUENCE
  Synthetic Construct
EKNE

SEQ ID NO: 610 - protein, 4 aa, ARTIFICIAL SEQUENCE
  Synthetic Construct
EKNF

SEQ ID NO: 611 - protein, 4 aa, ARTIFICIAL SEQUENCE
  Synthetic Construct
EKNG

SEQ ID NO: 612 - protein, 4 aa, ARTIFICIAL SEQUENCE
  Synthetic Construct
EKNH

SEQ ID NO: 613 - protein, 4 aa, ARTIFICIAL SEQUENCE
  Synthetic Construct
EKNI

SEQ ID NO: 614 - protein, 4 aa, ARTIFICIAL SEQUENCE
  Synthetic Construct
EKNL

SEQ ID NO: 615 - protein, 4 aa, ARTIFICIAL SEQUENCE
  Synthetic Construct
EKNN

SEQ ID NO: 616 - protein, 4 aa, ARTIFICIAL SEQUENCE
  Synthetic Construct
EKNQ

SEQ ID NO: 617 - protein, 4 aa, ARTIFICIAL SEQUENCE
  Synthetic Construct
EKNR

SEQ ID NO: 618 - protein, 4 aa, ARTIFICIAL SEQUENCE
  Synthetic Construct
EKNS

SEQ ID NO: 619 - protein, 4 aa, ARTIFICIAL SEQUENCE
  Synthetic Construct
EKNT

SEQ ID NO: 620 - protein, 4 aa, ARTIFICIAL SEQUENCE
  Synthetic Construct
EKNY

SEQ ID NO: 621 - protein, 4 aa, ARTIFICIAL SEQUENCE
  Synthetic Construct
EKPA

SEQ ID NO: 622 - protein, 4 aa, ARTIFICIAL SEQUENCE
  Synthetic Construct
EKPD

SEQ ID NO: 623 - protein, 4 aa, ARTIFICIAL SEQUENCE
  Synthetic Construct
EKPE

SEQ ID NO: 624 - protein, 4 aa, ARTIFICIAL SEQUENCE
  Synthetic Construct
EKPF

SEQ ID NO: 625 - protein, 4 aa, ARTIFICIAL SEQUENCE
  Synthetic Construct
EKPG

SEQ ID NO: 626 - protein, 4 aa, ARTIFICIAL SEQUENCE
  Synthetic Construct
EKPH

SEQ ID NO: 627 - protein, 4 aa, ARTIFICIAL SEQUENCE
  Synthetic Construct
EKPI

SEQ ID NO: 628 - protein, 4 aa, ARTIFICIAL SEQUENCE
  Synthetic Construct
EKPL

SEQ ID NO: 629 - protein, 4 aa, ARTIFICIAL SEQUENCE
  Synthetic Construct
EKPN

SEQ ID NO: 630 - protein, 4 aa, ARTIFICIAL SEQUENCE
  Synthetic Construct
EKPQ

SEQ ID NO: 631 - protein, 4 aa, ARTIFICIAL SEQUENCE
  Synthetic Construct
EKPR

SEQ ID NO: 632 - protein, 4 aa, ARTIFICIAL SEQUENCE
  Synthetic Construct
EKPS

SEQ ID NO: 633 - protein, 4 aa, ARTIFICIAL SEQUENCE
  Synthetic Construct
EKPT

SEQ ID NO: 634 - protein, 4 aa, ARTIFICIAL SEQUENCE
  Synthetic Construct
EKPY

SEQ ID NO: 635 - protein, 4 aa, ARTIFICIAL SEQUENCE
  Synthetic Construct
EKQA

SEQ ID NO: 636 - protein, 4 aa, ARTIFICIAL SEQUENCE
  Synthetic Construct
EKQD

SEQ ID NO: 637 - protein, 4 aa, ARTIFICIAL SEQUENCE
  Synthetic Construct
EKQE

SEQ ID NO: 638 - protein, 4 aa, ARTIFICIAL SEQUENCE
  Synthetic Construct
EKQF

SEQ ID NO: 639 - protein, 4 aa, ARTIFICIAL SEQUENCE
  Synthetic Construct
EKQG

SEQ ID NO: 640 - protein, 4 aa, ARTIFICIAL SEQUENCE
  Synthetic Construct
EKQH

SEQ ID NO: 641 - protein, 4 aa, ARTIFICIAL SEQUENCE
  Synthetic Construct
EKQI

SEQ ID NO: 642 - protein, 4 aa, ARTIFICIAL SEQUENCE
  Synthetic Construct
EKQL

SEQ ID NO: 643 - protein, 4 aa, ARTIFICIAL SEQUENCE
  Synthetic Construct
EKQN

SEQ ID NO: 644 - protein, 4 aa, ARTIFICIAL SEQUENCE
  Synthetic Construct
EKQQ

SEQ ID NO: 645 - protein, 4 aa, ARTIFICIAL SEQUENCE
  Synthetic Construct
EKQR

SEQ ID NO: 646 - protein, 4 aa, ARTIFICIAL SEQUENCE
  Synthetic Construct
EKQS

SEQ ID NO: 647 - protein, 4 aa, ARTIFICIAL SEQUENCE
  Synthetic Construct
EKQT

SEQ ID NO: 648 - protein, 4 aa, ARTIFICIAL SEQUENCE
  Synthetic Construct
EKQY

SEQ ID NO: 649 - protein, 4 aa, ARTIFICIAL SEQUENCE
  Synthetic Construct
EKRA

SEQ ID NO: 650 - protein, 4 aa, ARTIFICIAL SEQUENCE
  Synthetic Construct
EKRD

SEQ ID NO: 651 - protein, 4 aa, ARTIFICIAL SEQUENCE
  Synthetic Construct
EKRE

SEQ ID NO: 652 - protein, 4 aa, ARTIFICIAL SEQUENCE
  Synthetic Construct
EKRF

SEQ ID NO: 653 - protein, 4 aa, ARTIFICIAL SEQUENCE
  Synthetic Construct
EKRG

SEQ ID NO: 654 - protein, 4 aa, ARTIFICIAL SEQUENCE
  Synthetic Construct
EKRH

SEQ ID NO: 655 - protein, 4 aa, ARTIFICIAL SEQUENCE
  Synthetic Construct
EKRI

SEQ ID NO: 656 - protein, 4 aa, ARTIFICIAL SEQUENCE
  Synthetic Construct
EKRL

SEQ ID NO: 657 - protein, 4 aa, ARTIFICIAL SEQUENCE
  Synthetic Construct
EKRN

SEQ ID NO: 658 - protein, 4 aa, ARTIFICIAL SEQUENCE
  Synthetic Construct
EKRQ

SEQ ID NO: 659 - protein, 4 aa, ARTIFICIAL SEQUENCE
  Synthetic Construct
EKRR

SEQ ID NO: 660 - protein, 4 aa, ARTIFICIAL SEQUENCE
  Synthetic Construct
EKRS

SEQ ID NO: 661 - protein, 4 aa, ARTIFICIAL SEQUENCE
  Synthetic Construct
EKRT

SEQ ID NO: 662 - protein, 4 aa, ARTIFICIAL SEQUENCE
  Synthetic Construct
EKRY

SEQ ID NO: 663 - protein, 4 aa, ARTIFICIAL SEQUENCE
  Synthetic Construct
EKSA

SEQ ID NO: 664 - protein, 4 aa, ARTIFICIAL SEQUENCE
  Synthetic Construct
EKSD

SEQ ID NO: 665 - protein, 4 aa, ARTIFICIAL SEQUENCE
  Synthetic Construct
EKSE

SEQ ID NO: 666 - protein, 4 aa, ARTIFICIAL SEQUENCE
  Synthetic Construct
EKSF

SEQ ID NO: 667 - protein, 4 aa, ARTIFICIAL SEQUENCE
  Synthetic Construct
EKSG

SEQ ID NO: 668 - protein, 4 aa, ARTIFICIAL SEQUENCE
  Synthetic Construct
EKSH

SEQ ID NO: 669 - protein, 4 aa, ARTIFICIAL SEQUENCE
  Synthetic Construct
EKSI

SEQ ID NO: 670 - protein, 4 aa, ARTIFICIAL SEQUENCE
  Synthetic Construct
EKSL

SEQ ID NO: 671 - protein, 4 aa, ARTIFICIAL SEQUENCE
  Synthetic Construct
EKSN

SEQ ID NO: 672 - protein, 4 aa, ARTIFICIAL SEQUENCE
  Synthetic Construct
EKSQ

SEQ ID NO: 673 - protein, 4 aa, ARTIFICIAL SEQUENCE
  Synthetic Construct
EKSR

SEQ ID NO: 674 - protein, 4 aa, ARTIFICIAL SEQUENCE
  Synthetic Construct
EKSS

SEQ ID NO: 675 - protein, 4 aa, ARTIFICIAL SEQUENCE
  Synthetic Construct
EKST

SEQ ID NO: 676 - protein, 4 aa, ARTIFICIAL SEQUENCE
  Synthetic Construct
EKSY

SEQ ID NO: 677 - protein, 4 aa, ARTIFICIAL SEQUENCE
  Synthetic Construct
EKTA

SEQ ID NO: 678 - protein, 4 aa, ARTIFICIAL SEQUENCE
  Synthetic Construct
EKTD

SEQ ID NO: 679 - protein, 4 aa, ARTIFICIAL SEQUENCE
  Synthetic Construct
EKTE

SEQ ID NO: 680 - protein, 4 aa, ARTIFICIAL SEQUENCE
  Synthetic Construct
EKTF

SEQ ID NO: 681 - protein, 4 aa, ARTIFICIAL SEQUENCE
  Synthetic Construct
EKTG

SEQ ID NO: 682 - protein, 4 aa, ARTIFICIAL SEQUENCE
  Synthetic Construct
EKTH

SEQ ID NO: 683 - protein, 4 aa, ARTIFICIAL SEQUENCE
  Synthetic Construct
EKTI

SEQ ID NO: 684 - protein, 4 aa, ARTIFICIAL SEQUENCE
  Synthetic Construct
EKTL

SEQ ID NO: 685 - protein, 4 aa, ARTIFICIAL SEQUENCE
  Synthetic Construct
EKTN

SEQ ID NO: 686 - protein, 4 aa, ARTIFICIAL SEQUENCE
  Synthetic Construct
EKTQ

SEQ ID NO: 687 - protein, 4 aa, ARTIFICIAL SEQUENCE
  Synthetic Construct
EKTR

SEQ ID NO: 688 - protein, 4 aa, ARTIFICIAL SEQUENCE
  Synthetic Construct
EKTS

SEQ ID NO: 689 - protein, 4 aa, ARTIFICIAL SEQUENCE
  Synthetic Construct
EKTT

SEQ ID NO: 690 - protein, 4 aa, ARTIFICIAL SEQUENCE
  Synthetic Construct
EKTY

SEQ ID NO: 691 - protein, 4 aa, ARTIFICIAL SEQUENCE
  Synthetic Construct
EKYA

SEQ ID NO: 692 - protein, 4 aa, ARTIFICIAL SEQUENCE
  Synthetic Construct
EKYD

SEQ ID NO: 693 - protein, 4 aa, ARTIFICIAL SEQUENCE
  Synthetic Construct
EKYE

SEQ ID NO: 694 - protein, 4 aa, ARTIFICIAL SEQUENCE
  Synthetic Construct
EKYF

SEQ ID NO: 695 - protein, 4 aa, ARTIFICIAL SEQUENCE
  Synthetic Construct
EKYG

SEQ ID NO: 696 - protein, 4 aa, ARTIFICIAL SEQUENCE
  Synthetic Construct
EKYH

SEQ ID NO: 697 - protein, 4 aa, ARTIFICIAL SEQUENCE
  Synthetic Construct
EKYI

SEQ ID NO: 698 - protein, 4 aa, ARTIFICIAL SEQUENCE
  Synthetic Construct
EKYL

SEQ ID NO: 699 - protein, 4 aa, ARTIFICIAL SEQUENCE
  Synthetic Construct
EKYN

SEQ ID NO: 700 - protein, 4 aa, ARTIFICIAL SEQUENCE
  Synthetic Construct
EKYQ

SEQ ID NO: 701 - protein, 4 aa, ARTIFICIAL SEQUENCE
  Synthetic Construct
EKYR

SEQ ID NO: 702 - protein, 4 aa, ARTIFICIAL SEQUENCE
  Synthetic Construct
EKYS

SEQ ID NO: 703 - protein, 4 aa, ARTIFICIAL SEQUENCE
  Synthetic Construct
EKYT

SEQ ID NO: 704 - protein, 4 aa, ARTIFICIAL SEQUENCE
  Synthetic Construct
EKYY

SEQ ID NO: 705 - protein, 4 aa, ARTIFICIAL SEQUENCE
  Synthetic Construct
FKAA

SEQ ID NO: 706 - protein, 4 aa, ARTIFICIAL SEQUENCE
  Synthetic Construct
FKAD

SEQ ID NO: 707 - protein, 4 aa, ARTIFICIAL SEQUENCE
  Synthetic Construct
FKAE

SEQ ID NO: 708 - protein, 4 aa, ARTIFICIAL SEQUENCE
  Synthetic Construct
FKAF

SEQ ID NO: 709 - protein, 4 aa, ARTIFICIAL SEQUENCE
  Synthetic Construct
FKAG

SEQ ID NO: 710 - protein, 4 aa, ARTIFICIAL SEQUENCE
  Synthetic Construct
FKAH

SEQ ID NO: 711 - protein, 4 aa, ARTIFICIAL SEQUENCE
  Synthetic Construct
FKAI

SEQ ID NO: 712 - protein, 4 aa, ARTIFICIAL SEQUENCE
  Synthetic Construct
FKAL

SEQ ID NO: 713 - protein, 4 aa, ARTIFICIAL SEQUENCE
  Synthetic Construct
FKAN

SEQ ID NO: 714 - protein, 4 aa, ARTIFICIAL SEQUENCE
  Synthetic Construct
FKAQ

SEQ ID NO: 715 - protein, 4 aa, ARTIFICIAL SEQUENCE
  Synthetic Construct
FKAR

SEQ ID NO: 716 - protein, 4 aa, ARTIFICIAL SEQUENCE
  Synthetic Construct
FKAS

SEQ ID NO: 717 - protein, 4 aa, ARTIFICIAL SEQUENCE
  Synthetic Construct
FKAT

SEQ ID NO: 718 - protein, 4 aa, ARTIFICIAL SEQUENCE
  Synthetic Construct
FKAY

SEQ ID NO: 719 - protein, 4 aa, ARTIFICIAL SEQUENCE
  Synthetic Construct
FKDA

SEQ ID NO: 720 - protein, 4 aa, ARTIFICIAL SEQUENCE
  Synthetic Construct
FKDD

SEQ ID NO: 721 - protein, 4 aa, ARTIFICIAL SEQUENCE
  Synthetic Construct
FKDE

SEQ ID NO: 722 - protein, 4 aa, ARTIFICIAL SEQUENCE
  Synthetic Construct
FKDF

SEQ ID NO: 723 - protein, 4 aa, ARTIFICIAL SEQUENCE
  Synthetic Construct
FKDG

SEQ ID NO: 724 - protein, 4 aa, ARTIFICIAL SEQUENCE
  Synthetic Construct
FKDH

SEQ ID NO: 725 - protein, 4 aa, ARTIFICIAL SEQUENCE
  Synthetic Construct
FKDI

SEQ ID NO: 726 - protein, 4 aa, ARTIFICIAL SEQUENCE
  Synthetic Construct
FKDL

SEQ ID NO: 727 - protein, 4 aa, ARTIFICIAL SEQUENCE
  Synthetic Construct
FKDN

SEQ ID NO: 728 - protein, 4 aa, ARTIFICIAL SEQUENCE
  Synthetic Construct
FKDQ

SEQ ID NO: 729 - protein, 4 aa, ARTIFICIAL SEQUENCE
  Synthetic Construct
FKDR

SEQ ID NO: 730 - protein, 4 aa, ARTIFICIAL SEQUENCE
  Synthetic Construct
FKDS

SEQ ID NO: 731 - protein, 4 aa, ARTIFICIAL SEQUENCE
  Synthetic Construct
FKDT

SEQ ID NO: 732 - protein, 4 aa, ARTIFICIAL SEQUENCE
  Synthetic Construct
FKDY

SEQ ID NO: 733 - protein, 4 aa, ARTIFICIAL SEQUENCE
  Synthetic Construct
FKEA

SEQ ID NO: 734 - protein, 4 aa, ARTIFICIAL SEQUENCE
  Synthetic Construct
FKED

SEQ ID NO: 735 - protein, 4 aa, ARTIFICIAL SEQUENCE
  Synthetic Construct
FKEE

SEQ ID NO: 736 - protein, 4 aa, ARTIFICIAL SEQUENCE
  Synthetic Construct
FKEF

SEQ ID NO: 737 - protein, 4 aa, ARTIFICIAL SEQUENCE
  Synthetic Construct
FKEG

SEQ ID NO: 738 - protein, 4 aa, ARTIFICIAL SEQUENCE
  Synthetic Construct
FKEH

SEQ ID NO: 739 - protein, 4 aa, ARTIFICIAL SEQUENCE
  Synthetic Construct
FKEI

SEQ ID NO: 740 - protein, 4 aa, ARTIFICIAL SEQUENCE
  Synthetic Construct
FKEL

SEQ ID NO: 741 - protein, 4 aa, ARTIFICIAL SEQUENCE
  Synthetic Construct
FKEN

SEQ ID NO: 742 - protein, 4 aa, ARTIFICIAL SEQUENCE
  Synthetic Construct
FKEQ

SEQ ID NO: 743 - protein, 4 aa, ARTIFICIAL SEQUENCE
  Synthetic Construct
FKER

SEQ ID NO: 744 - protein, 4 aa, ARTIFICIAL SEQUENCE
  Synthetic Construct
FKES

SEQ ID NO: 745 - protein, 4 aa, ARTIFICIAL SEQUENCE
  Synthetic Construct
FKET

SEQ ID NO: 746 - protein, 4 aa, ARTIFICIAL SEQUENCE
  Synthetic Construct
FKEY

SEQ ID NO: 747 - protein, 4 aa, ARTIFICIAL SEQUENCE
  Synthetic Construct
FKFA

SEQ ID NO: 748 - protein, 4 aa, ARTIFICIAL SEQUENCE
  Synthetic Construct
FKFD

SEQ ID NO: 749 - protein, 4 aa, ARTIFICIAL SEQUENCE
  Synthetic Construct
FKFE

SEQ ID NO: 750 - protein, 4 aa, ARTIFICIAL SEQUENCE
  Synthetic Construct
FKFF

SEQ ID NO: 751 - protein, 4 aa, ARTIFICIAL SEQUENCE
  Synthetic Construct
FKFG

SEQ ID NO: 752 - protein, 4 aa, ARTIFICIAL SEQUENCE
  Synthetic Construct
FKFH

SEQ ID NO: 753 - protein, 4 aa, ARTIFICIAL SEQUENCE
  Synthetic Construct
FKFI

SEQ ID NO: 754 - protein, 4 aa, ARTIFICIAL SEQUENCE
  Synthetic Construct
FKFL

SEQ ID NO: 755 - protein, 4 aa, ARTIFICIAL SEQUENCE
  Synthetic Construct
FKFN

SEQ ID NO: 756 - protein, 4 aa, ARTIFICIAL SEQUENCE
  Synthetic Construct
FKFQ

SEQ ID NO: 757 - protein, 4 aa, ARTIFICIAL SEQUENCE
  Synthetic Construct
FKFR

SEQ ID NO: 758 - protein, 4 aa, ARTIFICIAL SEQUENCE
  Synthetic Construct
FKFS

SEQ ID NO: 759 - protein, 4 aa, ARTIFICIAL SEQUENCE
  Synthetic Construct
FKFT

SEQ ID NO: 760 - protein, 4 aa, ARTIFICIAL SEQUENCE
  Synthetic Construct
FKFY

SEQ ID NO: 761 - protein, 4 aa, ARTIFICIAL SEQUENCE
  Synthetic Construct
FKGA

SEQ ID NO: 762 - protein, 4 aa, ARTIFICIAL SEQUENCE
  Synthetic Construct
FKGD

SEQ ID NO: 763 - protein, 4 aa, ARTIFICIAL SEQUENCE
  Synthetic Construct
FKGE

SEQ ID NO: 764 - protein, 4 aa, ARTIFICIAL SEQUENCE
  Synthetic Construct
FKGF

SEQ ID NO: 765 - protein, 4 aa, ARTIFICIAL SEQUENCE
  Synthetic Construct
FKGG

SEQ ID NO: 766 - protein, 4 aa, ARTIFICIAL SEQUENCE
  Synthetic Construct
FKGH

SEQ ID NO: 767 - protein, 4 aa, ARTIFICIAL SEQUENCE
  Synthetic Construct
FKGI

SEQ ID NO: 768 - protein, 4 aa, ARTIFICIAL SEQUENCE
  Synthetic Construct
FKGL

SEQ ID NO: 769 - protein, 4 aa, ARTIFICIAL SEQUENCE
  Synthetic Construct
FKGN

SEQ ID NO: 770 - protein, 4 aa, ARTIFICIAL SEQUENCE
  Synthetic Construct
FKGQ

SEQ ID NO: 771 - protein, 4 aa, ARTIFICIAL SEQUENCE
  Synthetic Construct
FKGR

SEQ ID NO: 772 - protein, 4 aa, ARTIFICIAL SEQUENCE
  Synthetic Construct
FKGS

SEQ ID NO: 773 - protein, 4 aa, ARTIFICIAL SEQUENCE
  Synthetic Construct
FKGT

SEQ ID NO: 774 - protein, 4 aa, ARTIFICIAL SEQUENCE
  Synthetic Construct
FKGY

SEQ ID NO: 775 - protein, 4 aa, ARTIFICIAL SEQUENCE
  Synthetic Construct
FKHA

SEQ ID NO: 776 - protein, 4 aa, ARTIFICIAL SEQUENCE
  Synthetic Construct
FKHD

SEQ ID NO: 777 - protein, 4 aa, ARTIFICIAL SEQUENCE
  Synthetic Construct
FKHE

SEQ ID NO: 778 - protein, 4 aa, ARTIFICIAL SEQUENCE
  Synthetic Construct
FKHF

SEQ ID NO: 779 - protein, 4 aa, ARTIFICIAL SEQUENCE
  Synthetic Construct
FKHG

SEQ ID NO: 780 - protein, 4 aa, ARTIFICIAL SEQUENCE
  Synthetic Construct
FKHH

SEQ ID NO: 781 - protein, 4 aa, ARTIFICIAL SEQUENCE
  Synthetic Construct
FKHI

SEQ ID NO: 782 - protein, 4 aa, ARTIFICIAL SEQUENCE
  Synthetic Construct
FKHL

SEQ ID NO: 783 - protein, 4 aa, ARTIFICIAL SEQUENCE
  Synthetic Construct
FKHN

SEQ ID NO: 784 - protein, 4 aa, ARTIFICIAL SEQUENCE
  Synthetic Construct
FKHQ

SEQ ID NO: 785 - protein, 4 aa, ARTIFICIAL SEQUENCE
  Synthetic Construct
FKHR

SEQ ID NO: 786 - protein, 4 aa, ARTIFICIAL SEQUENCE
  Synthetic Construct
FKHS

SEQ ID NO: 787 - protein, 4 aa, ARTIFICIAL SEQUENCE
  Synthetic Construct
FKHT

SEQ ID NO: 788 - protein, 4 aa, ARTIFICIAL SEQUENCE
  Synthetic Construct
FKHY

SEQ ID NO: 789 - protein, 4 aa, ARTIFICIAL SEQUENCE
  Synthetic Construct
FKIA

SEQ ID NO: 790 - protein, 4 aa, ARTIFICIAL SEQUENCE
  Synthetic Construct
FKID

SEQ ID NO: 791 - protein, 4 aa, ARTIFICIAL SEQUENCE
  Synthetic Construct
FKIE

SEQ ID NO: 792 - protein, 4 aa, ARTIFICIAL SEQUENCE
  Synthetic Construct
FKIF

SEQ ID NO: 793 - protein, 4 aa, ARTIFICIAL SEQUENCE
  Synthetic Construct
FKIG

SEQ ID NO: 794 - protein, 4 aa, ARTIFICIAL SEQUENCE
  Synthetic Construct
FKIH

SEQ ID NO: 795 - protein, 4 aa, ARTIFICIAL SEQUENCE
  Synthetic Construct
FKII

SEQ ID NO: 796 - protein, 4 aa, ARTIFICIAL SEQUENCE
  Synthetic Construct
FKIL

SEQ ID NO: 797 - protein, 4 aa, ARTIFICIAL SEQUENCE
  Synthetic Construct
FKIN

SEQ ID NO: 798 - protein, 4 aa, ARTIFICIAL SEQUENCE
  Synthetic Construct
FKIQ

SEQ ID NO: 799 - protein, 4 aa, ARTIFICIAL SEQUENCE
  Synthetic Construct
FKIR

SEQ ID NO: 800 - protein, 4 aa, ARTIFICIAL SEQUENCE
  Synthetic Construct
FKIS

SEQ ID NO: 801 - protein, 4 aa, ARTIFICIAL SEQUENCE
  Synthetic Construct
FKIT

SEQ ID NO: 802 - protein, 4 aa, ARTIFICIAL SEQUENCE
  Synthetic Construct
FKIY

SEQ ID NO: 803 - protein, 4 aa, ARTIFICIAL SEQUENCE
  Synthetic Construct
FKLA

SEQ ID NO: 804 - protein, 4 aa, ARTIFICIAL SEQUENCE
  Synthetic Construct
FKLD

SEQ ID NO: 805 - protein, 4 aa, ARTIFICIAL SEQUENCE
  Synthetic Construct
FKLE

SEQ ID NO: 806 - protein, 4 aa, ARTIFICIAL SEQUENCE
  Synthetic Construct
FKLF

SEQ ID NO: 807 - protein, 4 aa, ARTIFICIAL SEQUENCE
  Synthetic Construct
FKLG

SEQ ID NO: 808 - protein, 4 aa, ARTIFICIAL SEQUENCE
  Synthetic Construct
FKLH

SEQ ID NO: 809 - protein, 4 aa, ARTIFICIAL SEQUENCE
  Synthetic Construct
FKLI

SEQ ID NO: 810 - protein, 4 aa, ARTIFICIAL SEQUENCE
  Synthetic Construct
FKLL

SEQ ID NO: 811 - protein, 4 aa, ARTIFICIAL SEQUENCE
  Synthetic Construct
FKLN

SEQ ID NO: 812 - protein, 4 aa, ARTIFICIAL SEQUENCE
  Synthetic Construct
FKLQ

SEQ ID NO: 813 - protein, 4 aa, ARTIFICIAL SEQUENCE
  Synthetic Construct
FKLR

SEQ ID NO: 814 - protein, 4 aa, ARTIFICIAL SEQUENCE
  Synthetic Construct
FKLS

SEQ ID NO: 815 - protein, 4 aa, ARTIFICIAL SEQUENCE
  Synthetic Construct
FKLT

SEQ ID NO: 816 - protein, 4 aa, ARTIFICIAL SEQUENCE
  Synthetic Construct
FKLY

SEQ ID NO: 817 - protein, 4 aa, ARTIFICIAL SEQUENCE
  Synthetic Construct
FKNA

SEQ ID NO: 818 - protein, 4 aa, ARTIFICIAL SEQUENCE
  Synthetic Construct
FKND

SEQ ID NO: 819 - protein, 4 aa, ARTIFICIAL SEQUENCE
  Synthetic Construct
FKNE

SEQ ID NO: 820 - protein, 4 aa, ARTIFICIAL SEQUENCE
  Synthetic Construct
FKNF

SEQ ID NO: 821 - protein, 4 aa, ARTIFICIAL SEQUENCE
  Synthetic Construct
FKNG

SEQ ID NO: 822 - protein, 4 aa, ARTIFICIAL SEQUENCE
  Synthetic Construct
FKNH

SEQ ID NO: 823 - protein, 4 aa, ARTIFICIAL SEQUENCE
  Synthetic Construct
FKNI

SEQ ID NO: 824 - protein, 4 aa, ARTIFICIAL SEQUENCE
  Synthetic Construct
FKNL

SEQ ID NO: 825 - protein, 4 aa, ARTIFICIAL SEQUENCE
  Synthetic Construct
FKNN

SEQ ID NO: 826 - protein, 4 aa, ARTIFICIAL SEQUENCE
  Synthetic Construct
FKNQ

SEQ ID NO: 827 - protein, 4 aa, ARTIFICIAL SEQUENCE
  Synthetic Construct
FKNR

SEQ ID NO: 828 - protein, 4 aa, ARTIFICIAL SEQUENCE
  Synthetic Construct
FKNS

SEQ ID NO: 829 - protein, 4 aa, ARTIFICIAL SEQUENCE
  Synthetic Construct
FKNT

SEQ ID NO: 830 - protein, 4 aa, ARTIFICIAL SEQUENCE
  Synthetic Construct
FKNY

SEQ ID NO: 831 - protein, 4 aa, ARTIFICIAL SEQUENCE
  Synthetic Construct
FKPA

SEQ ID NO: 832 - protein, 4 aa, ARTIFICIAL SEQUENCE
  Synthetic Construct
FKPD

SEQ ID NO: 833 - protein, 4 aa, ARTIFICIAL SEQUENCE
  Synthetic Construct
FKPE

SEQ ID NO: 834 - protein, 4 aa, ARTIFICIAL SEQUENCE
  Synthetic Construct
FKPF

SEQ ID NO: 835 - protein, 4 aa, ARTIFICIAL SEQUENCE
  Synthetic Construct
FKPG

SEQ ID NO: 836 - protein, 4 aa, ARTIFICIAL SEQUENCE
  Synthetic Construct
FKPH

SEQ ID NO: 837 - protein, 4 aa, ARTIFICIAL SEQUENCE
  Synthetic Construct
FKPI

SEQ ID NO: 838 - protein, 4 aa, ARTIFICIAL SEQUENCE
  Synthetic Construct
FKPL

SEQ ID NO: 839 - protein, 4 aa, ARTIFICIAL SEQUENCE
  Synthetic Construct
FKPN

SEQ ID NO: 840 - protein, 4 aa, ARTIFICIAL SEQUENCE
  Synthetic Construct
FKPQ

SEQ ID NO: 841 - protein, 4 aa, ARTIFICIAL SEQUENCE
  Synthetic Construct
FKPR

SEQ ID NO: 842 - protein, 4 aa, ARTIFICIAL SEQUENCE
  Synthetic Construct
FKPS

SEQ ID NO: 843 - protein, 4 aa, ARTIFICIAL SEQUENCE
  Synthetic Construct
FKPT

SEQ ID NO: 844 - protein, 4 aa, ARTIFICIAL SEQUENCE
  Synthetic Construct
FKPY

SEQ ID NO: 845 - protein, 4 aa, ARTIFICIAL SEQUENCE
  Synthetic Construct
FKQA

SEQ ID NO: 846 - protein, 4 aa, ARTIFICIAL SEQUENCE
  Synthetic Construct
FKQD

SEQ ID NO: 847 - protein, 4 aa, ARTIFICIAL SEQUENCE
  Synthetic Construct
FKQE

SEQ ID NO: 848 - protein, 4 aa, ARTIFICIAL SEQUENCE
  Synthetic Construct
FKQF

SEQ ID NO: 849 - protein, 4 aa, ARTIFICIAL SEQUENCE
  Synthetic Construct
FKQG

SEQ ID NO: 850 - protein, 4 aa, ARTIFICIAL SEQUENCE
  Synthetic Construct
FKQH

SEQ ID NO: 851 - protein, 4 aa, ARTIFICIAL SEQUENCE
  Synthetic Construct
FKQI

SEQ ID NO: 852 - protein, 4 aa, ARTIFICIAL SEQUENCE
  Synthetic Construct
FKQL

SEQ ID NO: 853 - protein, 4 aa, ARTIFICIAL SEQUENCE
  Synthetic Construct
FKQN

SEQ ID NO: 854 - protein, 4 aa, ARTIFICIAL SEQUENCE
  Synthetic Construct
FKQQ

SEQ ID NO: 855 - protein, 4 aa, ARTIFICIAL SEQUENCE
  Synthetic Construct
FKQR

SEQ ID NO: 856 - protein, 4 aa, ARTIFICIAL SEQUENCE
  Synthetic Construct
FKQS

SEQ ID NO: 857 - protein, 4 aa, ARTIFICIAL SEQUENCE
  Synthetic Construct
FKQT

SEQ ID NO: 858 - protein, 4 aa, ARTIFICIAL SEQUENCE
  Synthetic Construct
FKQY

SEQ ID NO: 859 - protein, 4 aa, ARTIFICIAL SEQUENCE
  Synthetic Construct
FKRA

SEQ ID NO: 860 - protein, 4 aa, ARTIFICIAL SEQUENCE
  Synthetic Construct
FKRD

SEQ ID NO: 861 - protein, 4 aa, ARTIFICIAL SEQUENCE
  Synthetic Construct
FKRE

SEQ ID NO: 862 - protein, 4 aa, ARTIFICIAL SEQUENCE
  Synthetic Construct
FKRF

SEQ ID NO: 863 - protein, 4 aa, ARTIFICIAL SEQUENCE
  Synthetic Construct
FKRG

SEQ ID NO: 864 - protein, 4 aa, ARTIFICIAL SEQUENCE
  Synthetic Construct
FKRH

SEQ ID NO: 865 - protein, 4 aa, ARTIFICIAL SEQUENCE
  Synthetic Construct
FKRI

SEQ ID NO: 866 - protein, 4 aa, ARTIFICIAL SEQUENCE
  Synthetic Construct
FKRL

SEQ ID NO: 867 - protein, 4 aa, ARTIFICIAL SEQUENCE
  Synthetic Construct
FKRN

SEQ ID NO: 868 - protein, 4 aa, ARTIFICIAL SEQUENCE
  Synthetic Construct
FKRQ

SEQ ID NO: 869 - protein, 4 aa, ARTIFICIAL SEQUENCE
  Synthetic Construct
FKRR

SEQ ID NO: 870 - protein, 4 aa, ARTIFICIAL SEQUENCE
  Synthetic Construct
FKRS

SEQ ID NO: 871 - protein, 4 aa, ARTIFICIAL SEQUENCE
  Synthetic Construct
FKRT

SEQ ID NO: 872 - protein, 4 aa, ARTIFICIAL SEQUENCE
  Synthetic Construct
FKRY

SEQ ID NO: 873 - protein, 4 aa, ARTIFICIAL SEQUENCE
  Synthetic Construct
FKSA

SEQ ID NO: 874 - protein, 4 aa, ARTIFICIAL SEQUENCE
  Synthetic Construct
FKSD

SEQ ID NO: 875 - protein, 4 aa, ARTIFICIAL SEQUENCE
  Synthetic Construct
FKSE

SEQ ID NO: 876 - protein, 4 aa, ARTIFICIAL SEQUENCE
  Synthetic Construct
FKSF

SEQ ID NO: 877 - protein, 4 aa, ARTIFICIAL SEQUENCE
  Synthetic Construct
FKSG

SEQ ID NO: 878 - protein, 4 aa, ARTIFICIAL SEQUENCE
  Synthetic Construct
FKSH

SEQ ID NO: 879 - protein, 4 aa, ARTIFICIAL SEQUENCE
  Synthetic Construct
FKSI

SEQ ID NO: 880 - protein, 4 aa, ARTIFICIAL SEQUENCE
  Synthetic Construct
FKSL

SEQ ID NO: 881 - protein, 4 aa, ARTIFICIAL SEQUENCE
  Synthetic Construct
FKSN

SEQ ID NO: 882 - protein, 4 aa, ARTIFICIAL SEQUENCE
  Synthetic Construct
FKSQ

SEQ ID NO: 883 - protein, 4 aa, ARTIFICIAL SEQUENCE
  Synthetic Construct
FKSR

SEQ ID NO: 884 - protein, 4 aa, ARTIFICIAL SEQUENCE
  Synthetic Construct
FKSS

SEQ ID NO: 885 - protein, 4 aa, ARTIFICIAL SEQUENCE
  Synthetic Construct
FKST

SEQ ID NO: 886 - protein, 4 aa, ARTIFICIAL SEQUENCE
  Synthetic Construct
FKSY

SEQ ID NO: 887 - protein, 4 aa, ARTIFICIAL SEQUENCE
  Synthetic Construct
FKTA

SEQ ID NO: 888 - protein, 4 aa, ARTIFICIAL SEQUENCE
  Synthetic Construct
FKTD

SEQ ID NO: 889 - protein, 4 aa, ARTIFICIAL SEQUENCE
  Synthetic Construct
FKTE

SEQ ID NO: 890 - protein, 4 aa, ARTIFICIAL SEQUENCE
  Synthetic Construct
FKTF

SEQ ID NO: 891 - protein, 4 aa, ARTIFICIAL SEQUENCE
  Synthetic Construct
FKTG

SEQ ID NO: 892 - protein, 4 aa, ARTIFICIAL SEQUENCE
  Synthetic Construct
FKTH

SEQ ID NO: 893 - protein, 4 aa, ARTIFICIAL SEQUENCE
  Synthetic Construct
FKTI

SEQ ID NO: 894 - protein, 4 aa, ARTIFICIAL SEQUENCE
  Synthetic Construct
FKTL

SEQ ID NO: 895 - protein, 4 aa, ARTIFICIAL SEQUENCE
  Synthetic Construct
FKTN

SEQ ID NO: 896 - protein, 4 aa, ARTIFICIAL SEQUENCE
  Synthetic Construct
FKTQ

SEQ ID NO: 897 - protein, 4 aa, ARTIFICIAL SEQUENCE
  Synthetic Construct
FKTR

SEQ ID NO: 898 - protein, 4 aa, ARTIFICIAL SEQUENCE
  Synthetic Construct
FKTS

SEQ ID NO: 899 - protein, 4 aa, ARTIFICIAL SEQUENCE
  Synthetic Construct
FKTT

SEQ ID NO: 900 - protein, 4 aa, ARTIFICIAL SEQUENCE
  Synthetic Construct
FKTY

SEQ ID NO: 901 - protein, 4 aa, ARTIFICIAL SEQUENCE
  Synthetic Construct
FKYA

SEQ ID NO: 902 - protein, 4 aa, ARTIFICIAL SEQUENCE
  Synthetic Construct
FKYD

SEQ ID NO: 903 - protein, 4 aa, ARTIFICIAL SEQUENCE
  Synthetic Construct
FKYE

SEQ ID NO: 904 - protein, 4 aa, ARTIFICIAL SEQUENCE
  Synthetic Construct
FKYF

SEQ ID NO: 905 - protein, 4 aa, ARTIFICIAL SEQUENCE
  Synthetic Construct
FKYG

SEQ ID NO: 906 - protein, 4 aa, ARTIFICIAL SEQUENCE
  Synthetic Construct
FKYH

SEQ ID NO: 907 - protein, 4 aa, ARTIFICIAL SEQUENCE
  Synthetic Construct
FKYI

SEQ ID NO: 908 - protein, 4 aa, ARTIFICIAL SEQUENCE
  Synthetic Construct
FKYL

SEQ ID NO: 909 - protein, 4 aa, ARTIFICIAL SEQUENCE
  Synthetic Construct
FKYN

SEQ ID NO: 910 - protein, 4 aa, ARTIFICIAL SEQUENCE
  Synthetic Construct
FKYQ

SEQ ID NO: 911 - protein, 4 aa, ARTIFICIAL SEQUENCE
  Synthetic Construct
FKYR

SEQ ID NO: 912 - protein, 4 aa, ARTIFICIAL SEQUENCE
  Synthetic Construct
FKYS

SEQ ID NO: 913 - protein, 4 aa, ARTIFICIAL SEQUENCE
  Synthetic Construct
FKYT

SEQ ID NO: 914 - protein, 4 aa, ARTIFICIAL SEQUENCE
  Synthetic Construct
FKYY

SEQ ID NO: 915 - protein, 4 aa, ARTIFICIAL SEQUENCE
  Synthetic Construct
GKAA

SEQ ID NO: 916 - protein, 4 aa, ARTIFICIAL SEQUENCE
  Synthetic Construct
GKAD

SEQ ID NO: 917 - protein, 4 aa, ARTIFICIAL SEQUENCE
  Synthetic Construct
GKAE

SEQ ID NO: 918 - protein, 4 aa, ARTIFICIAL SEQUENCE
  Synthetic Construct
GKAF

SEQ ID NO: 919 - protein, 4 aa, ARTIFICIAL SEQUENCE
  Synthetic Construct
GKAG

SEQ ID NO: 920 - protein, 4 aa, ARTIFICIAL SEQUENCE
  Synthetic Construct
GKAH

SEQ ID NO: 921 - protein, 4 aa, ARTIFICIAL SEQUENCE
  Synthetic Construct
GKAI

SEQ ID NO: 922 - protein, 4 aa, ARTIFICIAL SEQUENCE
  Synthetic Construct
GKAL

SEQ ID NO: 923 - protein, 4 aa, ARTIFICIAL SEQUENCE
  Synthetic Construct
GKAN

SEQ ID NO: 924 - protein, 4 aa, ARTIFICIAL SEQUENCE
  Synthetic Construct
GKAQ

SEQ ID NO: 925 - protein, 4 aa, ARTIFICIAL SEQUENCE
  Synthetic Construct
GKAR

SEQ ID NO: 926 - protein, 4 aa, ARTIFICIAL SEQUENCE
  Synthetic Construct
GKAS

SEQ ID NO: 927 - protein, 4 aa, ARTIFICIAL SEQUENCE
  Synthetic Construct
GKAT

SEQ ID NO: 928 - protein, 4 aa, ARTIFICIAL SEQUENCE
  Synthetic Construct
GKAY

SEQ ID NO: 929 - protein, 4 aa, ARTIFICIAL SEQUENCE
  Synthetic Construct
GKDA

SEQ ID NO: 930 - protein, 4 aa, ARTIFICIAL SEQUENCE
  Synthetic Construct
GKDD

SEQ ID NO: 931 - protein, 4 aa, ARTIFICIAL SEQUENCE
  Synthetic Construct
GKDE

SEQ ID NO: 932 - protein, 4 aa, ARTIFICIAL SEQUENCE
  Synthetic Construct
GKDF

SEQ ID NO: 933 - protein, 4 aa, ARTIFICIAL SEQUENCE
  Synthetic Construct
GKDG

SEQ ID NO: 934 - protein, 4 aa, ARTIFICIAL SEQUENCE
  Synthetic Construct
GKDH

SEQ ID NO: 935 - protein, 4 aa, ARTIFICIAL SEQUENCE
  Synthetic Construct
GKDI

SEQ ID NO: 936 - protein, 4 aa, ARTIFICIAL SEQUENCE
  Synthetic Construct
GKDL

SEQ ID NO: 937 - protein, 4 aa, ARTIFICIAL SEQUENCE
  Synthetic Construct
GKDN

SEQ ID NO: 938 - protein, 4 aa, ARTIFICIAL SEQUENCE
  Synthetic Construct
GKDQ

SEQ ID NO: 939 - protein, 4 aa, ARTIFICIAL SEQUENCE
  Synthetic Construct
GKDR

SEQ ID NO: 940 - protein, 4 aa, ARTIFICIAL SEQUENCE
  Synthetic Construct
GKDS

SEQ ID NO: 941 - protein, 4 aa, ARTIFICIAL SEQUENCE
  Synthetic Construct
GKDT

SEQ ID NO: 942 - protein, 4 aa, ARTIFICIAL SEQUENCE
  Synthetic Construct
GKDY

SEQ ID NO: 943 - protein, 4 aa, ARTIFICIAL SEQUENCE
  Synthetic Construct
GKEA

SEQ ID NO: 944 - protein, 4 aa, ARTIFICIAL SEQUENCE
  Synthetic Construct
GKED

SEQ ID NO: 945 - protein, 4 aa, ARTIFICIAL SEQUENCE
  Synthetic Construct
GKEE

SEQ ID NO: 946 - protein, 4 aa, ARTIFICIAL SEQUENCE
  Synthetic Construct
GKEF

SEQ ID NO: 947 - protein, 4 aa, ARTIFICIAL SEQUENCE
  Synthetic Construct
GKEG

SEQ ID NO: 948 - protein, 4 aa, ARTIFICIAL SEQUENCE
  Synthetic Construct
GKEH

SEQ ID NO: 949 - protein, 4 aa, ARTIFICIAL SEQUENCE
  Synthetic Construct
GKEI

SEQ ID NO: 950 - protein, 4 aa, ARTIFICIAL SEQUENCE
  Synthetic Construct
GKEL

SEQ ID NO: 951 - protein, 4 aa, ARTIFICIAL SEQUENCE
  Synthetic Construct
GKEN

SEQ ID NO: 952 - protein, 4 aa, ARTIFICIAL SEQUENCE
  Synthetic Construct
GKEQ

SEQ ID NO: 953 - protein, 4 aa, ARTIFICIAL SEQUENCE
  Synthetic Construct
GKER

SEQ ID NO: 954 - protein, 4 aa, ARTIFICIAL SEQUENCE
  Synthetic Construct
GKES

SEQ ID NO: 955 - protein, 4 aa, ARTIFICIAL SEQUENCE
  Synthetic Construct
GKET

SEQ ID NO: 956 - protein, 4 aa, ARTIFICIAL SEQUENCE
  Synthetic Construct
GKEY

SEQ ID NO: 957 - protein, 4 aa, ARTIFICIAL SEQUENCE
  Synthetic Construct
GKFA

SEQ ID NO: 958 - protein, 4 aa, ARTIFICIAL SEQUENCE
  Synthetic Construct
GKFD

SEQ ID NO: 959 - protein, 4 aa, ARTIFICIAL SEQUENCE
  Synthetic Construct
GKFE

SEQ ID NO: 960 - protein, 4 aa, ARTIFICIAL SEQUENCE
  Synthetic Construct
GKFF

SEQ ID NO: 961 - protein, 4 aa, ARTIFICIAL SEQUENCE
  Synthetic Construct
GKFG

SEQ ID NO: 962 - protein, 4 aa, ARTIFICIAL SEQUENCE
  Synthetic Construct
GKFH

SEQ ID NO: 963 - protein, 4 aa, ARTIFICIAL SEQUENCE
  Synthetic Construct
GKFI

SEQ ID NO: 964 - protein, 4 aa, ARTIFICIAL SEQUENCE
  Synthetic Construct
GKFL

SEQ ID NO: 965 - protein, 4 aa, ARTIFICIAL SEQUENCE
  Synthetic Construct
GKFN

SEQ ID NO: 966 - protein, 4 aa, ARTIFICIAL SEQUENCE
  Synthetic Construct
GKFQ

SEQ ID NO: 967 - protein, 4 aa, ARTIFICIAL SEQUENCE
  Synthetic Construct
GKFR

SEQ ID NO: 968 - protein, 4 aa, ARTIFICIAL SEQUENCE
  Synthetic Construct
GKFS

SEQ ID NO: 969 - protein, 4 aa, ARTIFICIAL SEQUENCE
  Synthetic Construct
GKFT

SEQ ID NO: 970 - protein, 4 aa, ARTIFICIAL SEQUENCE
  Synthetic Construct
GKFY

SEQ ID NO: 971 - protein, 4 aa, ARTIFICIAL SEQUENCE
  Synthetic Construct
GKGA

SEQ ID NO: 972 - protein, 4 aa, ARTIFICIAL SEQUENCE
  Synthetic Construct
GKGD

SEQ ID NO: 973 - protein, 4 aa, ARTIFICIAL SEQUENCE
  Synthetic Construct
GKGE

SEQ ID NO: 974 - protein, 4 aa, ARTIFICIAL SEQUENCE
  Synthetic Construct
GKGF

SEQ ID NO: 975 - protein, 4 aa, ARTIFICIAL SEQUENCE
  Synthetic Construct
GKGG

SEQ ID NO: 976 - protein, 4 aa, ARTIFICIAL SEQUENCE
  Synthetic Construct
GKGH

SEQ ID NO: 977 - protein, 4 aa, ARTIFICIAL SEQUENCE
  Synthetic Construct
GKGI

SEQ ID NO: 978 - protein, 4 aa, ARTIFICIAL SEQUENCE
  Synthetic Construct
GKGL

SEQ ID NO: 979 - protein, 4 aa, ARTIFICIAL SEQUENCE
  Synthetic Construct
GKGN

SEQ ID NO: 980 - protein, 4 aa, ARTIFICIAL SEQUENCE
  Synthetic Construct
GKGQ

SEQ ID NO: 981 - protein, 4 aa, ARTIFICIAL SEQUENCE
  Synthetic Construct
GKGR

SEQ ID NO: 982 - protein, 4 aa, ARTIFICIAL SEQUENCE
  Synthetic Construct
GKGS

SEQ ID NO: 983 - protein, 4 aa, ARTIFICIAL SEQUENCE
  Synthetic Construct
GKGT

SEQ ID NO: 984 - protein, 4 aa, ARTIFICIAL SEQUENCE
  Synthetic Construct
GKGY

SEQ ID NO: 985 - protein, 4 aa, ARTIFICIAL SEQUENCE
  Synthetic Construct
GKHA

SEQ ID NO: 986 - protein, 4 aa, ARTIFICIAL SEQUENCE
  Synthetic Construct
GKHD

SEQ ID NO: 987 - protein, 4 aa, ARTIFICIAL SEQUENCE
  Synthetic Construct
GKHE

SEQ ID NO: 988 - protein, 4 aa, ARTIFICIAL SEQUENCE
  Synthetic Construct
GKHF

SEQ ID NO: 989 - protein, 4 aa, ARTIFICIAL SEQUENCE
  Synthetic Construct
GKHG

SEQ ID NO: 990 - protein, 4 aa, ARTIFICIAL SEQUENCE
  Synthetic Construct
GKHH

SEQ ID NO: 991 - protein, 4 aa, ARTIFICIAL SEQUENCE
  Synthetic Construct
GKHI

SEQ ID NO: 992 - protein, 4 aa, ARTIFICIAL SEQUENCE
  Synthetic Construct
GKHL

SEQ ID NO: 993 - protein, 4 aa, ARTIFICIAL SEQUENCE
  Synthetic Construct
GKHN

SEQ ID NO: 994 - protein, 4 aa, ARTIFICIAL SEQUENCE
  Synthetic Construct
GKHQ

SEQ ID NO: 995 - protein, 4 aa, ARTIFICIAL SEQUENCE
  Synthetic Construct
GKHR

SEQ ID NO: 996 - protein, 4 aa, ARTIFICIAL SEQUENCE
  Synthetic Construct
GKHS

SEQ ID NO: 997 - protein, 4 aa, ARTIFICIAL SEQUENCE
  Synthetic Construct
GKHT

SEQ ID NO: 998 - protein, 4 aa, ARTIFICIAL SEQUENCE
  Synthetic Construct
GKHY

SEQ ID NO: 999 - protein, 4 aa, ARTIFICIAL SEQUENCE
  Synthetic Construct
GKIA

SEQ ID NO: 1000 - protein, 4 aa, ARTIFICIAL SEQUENCE
  Synthetic Construct
GKID

SEQ ID NO: 1001 - protein, 4 aa, ARTIFICIAL SEQUENCE
  Synthetic Construct
GKIE

SEQ ID NO: 1002 - protein, 4 aa, ARTIFICIAL SEQUENCE
  Synthetic Construct
GKIF

SEQ ID NO: 1003 - protein, 4 aa, ARTIFICIAL SEQUENCE
  Synthetic Construct
GKIG

SEQ ID NO: 1004 - protein, 4 aa, ARTIFICIAL SEQUENCE
  Synthetic Construct
GKIH

SEQ ID NO: 1005 - protein, 4 aa, ARTIFICIAL SEQUENCE
  Synthetic Construct
GKII

SEQ ID NO: 1006 - protein, 4 aa, ARTIFICIAL SEQUENCE
  Synthetic Construct
GKIL

SEQ ID NO: 1007 - protein, 4 aa, ARTIFICIAL SEQUENCE
  Synthetic Construct
GKIN

SEQ ID NO: 1008 - protein, 4 aa, ARTIFICIAL SEQUENCE
  Synthetic Construct
GKIQ

SEQ ID NO: 1009 - protein, 4 aa, ARTIFICIAL SEQUENCE
  Synthetic Construct
GKIR

SEQ ID NO: 1010 - protein, 4 aa, ARTIFICIAL SEQUENCE
  Synthetic Construct
GKIS

SEQ ID NO: 1011 - protein, 4 aa, ARTIFICIAL SEQUENCE
  Synthetic Construct
GKIT

SEQ ID NO: 1012 - protein, 4 aa, ARTIFICIAL SEQUENCE
  Synthetic Construct
GKIY

SEQ ID NO: 1013 - protein, 4 aa, ARTIFICIAL SEQUENCE
  Synthetic Construct
GKLA

SEQ ID NO: 1014 - protein, 4 aa, ARTIFICIAL SEQUENCE
  Synthetic Construct
GKLD

SEQ ID NO: 1015 - protein, 4 aa, ARTIFICIAL SEQUENCE
  Synthetic Construct
GKLE

SEQ ID NO: 1016 - protein, 4 aa, ARTIFICIAL SEQUENCE
  Synthetic Construct
GKLF

SEQ ID NO: 1017 - protein, 4 aa, ARTIFICIAL SEQUENCE
  Synthetic Construct
GKLG

SEQ ID NO: 1018 - protein, 4 aa, ARTIFICIAL SEQUENCE
  Synthetic Construct
GKLH

SEQ ID NO: 1019 - protein, 4 aa, ARTIFICIAL SEQUENCE
  Synthetic Construct
GKLI

SEQ ID NO: 1020 - protein, 4 aa, ARTIFICIAL SEQUENCE
  Synthetic Construct
GKLL

SEQ ID NO: 1021 - protein, 4 aa, ARTIFICIAL SEQUENCE
  Synthetic Construct
GKLN

SEQ ID NO: 1022 - protein, 4 aa, ARTIFICIAL SEQUENCE
  Synthetic Construct
GKLQ

SEQ ID NO: 1023 - protein, 4 aa, ARTIFICIAL SEQUENCE
  Synthetic Construct
GKLR

SEQ ID NO: 1024 - protein, 4 aa, ARTIFICIAL SEQUENCE
  Synthetic Construct
GKLS

SEQ ID NO: 1025 - protein, 4 aa, ARTIFICIAL SEQUENCE
  Synthetic Construct
GKLT

SEQ ID NO: 1026 - protein, 4 aa, ARTIFICIAL SEQUENCE
  Synthetic Construct
GKLY

SEQ ID NO: 1027 - protein, 4 aa, ARTIFICIAL SEQUENCE
  Synthetic Construct
GKNA

SEQ ID NO: 1028 - protein, 4 aa, ARTIFICIAL SEQUENCE
  Synthetic Construct
GKND

SEQ ID NO: 1029 - protein, 4 aa, ARTIFICIAL SEQUENCE
  Synthetic Construct
GKNE

SEQ ID NO: 1030 - protein, 4 aa, ARTIFICIAL SEQUENCE
  Synthetic Construct
GKNF

SEQ ID NO: 1031 - protein, 4 aa, ARTIFICIAL SEQUENCE
  Synthetic Construct
GKNG

SEQ ID NO: 1032 - protein, 4 aa, ARTIFICIAL SEQUENCE
  Synthetic Construct
GKNH

SEQ ID NO: 1033 - protein, 4 aa, ARTIFICIAL SEQUENCE
  Synthetic Construct
GKNI

SEQ ID NO: 1034 - protein, 4 aa, ARTIFICIAL SEQUENCE
  Synthetic Construct
GKNL

SEQ ID NO: 1035 - protein, 4 aa, ARTIFICIAL SEQUENCE
  Synthetic Construct
GKNN

SEQ ID NO: 1036 - protein, 4 aa, ARTIFICIAL SEQUENCE
  Synthetic Construct
GKNQ

SEQ ID NO: 1037 - protein, 4 aa, ARTIFICIAL SEQUENCE
  Synthetic Construct
GKNR

SEQ ID NO: 1038 - protein, 4 aa, ARTIFICIAL SEQUENCE
  Synthetic Construct
GKNS

SEQ ID NO: 1039 - protein, 4 aa, ARTIFICIAL SEQUENCE
  Synthetic Construct
GKNT

SEQ ID NO: 1040 - protein, 4 aa, ARTIFICIAL SEQUENCE
  Synthetic Construct
GKNY

SEQ ID NO: 1041 - protein, 4 aa, ARTIFICIAL SEQUENCE
  Synthetic Construct
GKPA

SEQ ID NO: 1042 - protein, 4 aa, ARTIFICIAL SEQUENCE
  Synthetic Construct
GKPD

SEQ ID NO: 1043 - protein, 4 aa, ARTIFICIAL SEQUENCE
  Synthetic Construct
GKPE

SEQ ID NO: 1044 - protein, 4 aa, ARTIFICIAL SEQUENCE
  Synthetic Construct
GKPF

SEQ ID NO: 1045 - protein, 4 aa, ARTIFICIAL SEQUENCE
  Synthetic Construct
GKPG

SEQ ID NO: 1046 - protein, 4 aa, ARTIFICIAL SEQUENCE
  Synthetic Construct
GKPH

SEQ ID NO: 1047 - protein, 4 aa, ARTIFICIAL SEQUENCE
  Synthetic Construct
GKPI

SEQ ID NO: 1048 - protein, 4 aa, ARTIFICIAL SEQUENCE
  Synthetic Construct
GKPL

SEQ ID NO: 1049 - protein, 4 aa, ARTIFICIAL SEQUENCE
  Synthetic Construct
GKPN

SEQ ID NO: 1050 - protein, 4 aa, ARTIFICIAL SEQUENCE
  Synthetic Construct
GKPQ

SEQ ID NO: 1051 - protein, 4 aa, ARTIFICIAL SEQUENCE
  Synthetic Construct
GKPR

SEQ ID NO: 1052 - protein, 4 aa, ARTIFICIAL SEQUENCE
  Synthetic Construct
GKPS

SEQ ID NO: 1053 - protein, 4 aa, ARTIFICIAL SEQUENCE
  Synthetic Construct
GKPT

SEQ ID NO: 1054 - protein, 4 aa, ARTIFICIAL SEQUENCE
  Synthetic Construct
GKPY

SEQ ID NO: 1055 - protein, 4 aa, ARTIFICIAL SEQUENCE
  Synthetic Construct
GKQA

SEQ ID NO: 1056 - protein, 4 aa, ARTIFICIAL SEQUENCE
  Synthetic Construct
GKQD

SEQ ID NO: 1057 - protein, 4 aa, ARTIFICIAL SEQUENCE
  Synthetic Construct
GKQE

SEQ ID NO: 1058 - protein, 4 aa, ARTIFICIAL SEQUENCE
  Synthetic Construct
GKQF

SEQ ID NO: 1059 - protein, 4 aa, ARTIFICIAL SEQUENCE
  Synthetic Construct
GKQG

SEQ ID NO: 1060 - protein, 4 aa, ARTIFICIAL SEQUENCE
  Synthetic Construct
GKQH

SEQ ID NO: 1061 - protein, 4 aa, ARTIFICIAL SEQUENCE
  Synthetic Construct
GKQI

SEQ ID NO: 1062 - protein, 4 aa, ARTIFICIAL SEQUENCE
  Synthetic Construct
GKQL

SEQ ID NO: 1063 - protein, 4 aa, ARTIFICIAL SEQUENCE
  Synthetic Construct
GKQN

SEQ ID NO: 1064 - protein, 4 aa, ARTIFICIAL SEQUENCE
  Synthetic Construct
GKQQ

SEQ ID NO: 1065 - protein, 4 aa, ARTIFICIAL SEQUENCE
  Synthetic Construct
GKQR

SEQ ID NO: 1066 - protein, 4 aa, ARTIFICIAL SEQUENCE
  Synthetic Construct
GKQS

SEQ ID NO: 1067 - protein, 4 aa, ARTIFICIAL SEQUENCE
  Synthetic Construct
GKQT

SEQ ID NO: 1068 - protein, 4 aa, ARTIFICIAL SEQUENCE
  Synthetic Construct
GKQY

SEQ ID NO: 1069 - protein, 4 aa, ARTIFICIAL SEQUENCE
  Synthetic Construct
GKRA

SEQ ID NO: 1070 - protein, 4 aa, ARTIFICIAL SEQUENCE
  Synthetic Construct
GKRD

SEQ ID NO: 1071 - protein, 4 aa, ARTIFICIAL SEQUENCE
  Synthetic Construct
GKRE

SEQ ID NO: 1072 - protein, 4 aa, ARTIFICIAL SEQUENCE
  Synthetic Construct
GKRF

SEQ ID NO: 1073 - protein, 4 aa, ARTIFICIAL SEQUENCE
  Synthetic Construct
GKRG

SEQ ID NO: 1074 - protein, 4 aa, ARTIFICIAL SEQUENCE
  Synthetic Construct
GKRH

SEQ ID NO: 1075 - protein, 4 aa, ARTIFICIAL SEQUENCE
  Synthetic Construct
GKRI

SEQ ID NO: 1076 - protein, 4 aa, ARTIFICIAL SEQUENCE
  Synthetic Construct
GKRL

SEQ ID NO: 1077 - protein, 4 aa, ARTIFICIAL SEQUENCE
  Synthetic Construct
GKRN

SEQ ID NO: 1078 - protein, 4 aa, ARTIFICIAL SEQUENCE
  Synthetic Construct
GKRQ

SEQ ID NO: 1079 - protein, 4 aa, ARTIFICIAL SEQUENCE
  Synthetic Construct
GKRR

SEQ ID NO: 1080 - protein, 4 aa, ARTIFICIAL SEQUENCE
  Synthetic Construct
GKRS

SEQ ID NO: 1081 - protein, 4 aa, ARTIFICIAL SEQUENCE
  Synthetic Construct
GKRT

SEQ ID NO: 1082 - protein, 4 aa, ARTIFICIAL SEQUENCE
  Synthetic Construct
GKRY

SEQ ID NO: 1083 - protein, 4 aa, ARTIFICIAL SEQUENCE
  Synthetic Construct
GKSA

SEQ ID NO: 1084 - protein, 4 aa, ARTIFICIAL SEQUENCE
  Synthetic Construct
GKSD

SEQ ID NO: 1085 - protein, 4 aa, ARTIFICIAL SEQUENCE
  Synthetic Construct
GKSE

SEQ ID NO: 1086 - protein, 4 aa, ARTIFICIAL SEQUENCE
  Synthetic Construct
GKSF

SEQ ID NO: 1087 - protein, 4 aa, ARTIFICIAL SEQUENCE
  Synthetic Construct
GKSG

SEQ ID NO: 1088 - protein, 4 aa, ARTIFICIAL SEQUENCE
  Synthetic Construct
GKSH

SEQ ID NO: 1089 - protein, 4 aa, ARTIFICIAL SEQUENCE
  Synthetic Construct
GKSI

SEQ ID NO: 1090 - protein, 4 aa, ARTIFICIAL SEQUENCE
  Synthetic Construct
GKSL

SEQ ID NO: 1091 - protein, 4 aa, ARTIFICIAL SEQUENCE
  Synthetic Construct
GKSN

SEQ ID NO: 1092 - protein, 4 aa, ARTIFICIAL SEQUENCE
  Synthetic Construct
GKSQ

SEQ ID NO: 1093 - protein, 4 aa, ARTIFICIAL SEQUENCE
  Synthetic Construct
GKSR

SEQ ID NO: 1094 - protein, 4 aa, ARTIFICIAL SEQUENCE
  Synthetic Construct
GKSS

SEQ ID NO: 1095 - protein, 4 aa, ARTIFICIAL SEQUENCE
  Synthetic Construct
GKST

SEQ ID NO: 1096 - protein, 4 aa, ARTIFICIAL SEQUENCE
  Synthetic Construct
GKSY

SEQ ID NO: 1097 - protein, 4 aa, ARTIFICIAL SEQUENCE
  Synthetic Construct
GKTA

SEQ ID NO: 1098 - protein, 4 aa, ARTIFICIAL SEQUENCE
  Synthetic Construct
GKTD

SEQ ID NO: 1099 - protein, 4 aa, ARTIFICIAL SEQUENCE
  Synthetic Construct
GKTE

SEQ ID NO: 1100 - protein, 4 aa, ARTIFICIAL SEQUENCE
  Synthetic Construct
GKTF

SEQ ID NO: 1101 - protein, 4 aa, ARTIFICIAL SEQUENCE
  Synthetic Construct
GKTG

SEQ ID NO: 1102 - protein, 4 aa, ARTIFICIAL SEQUENCE
  Synthetic Construct
GKTH

SEQ ID NO: 1103 - protein, 4 aa, ARTIFICIAL SEQUENCE
  Synthetic Construct
GKTI

SEQ ID NO: 1104 - protein, 4 aa, ARTIFICIAL SEQUENCE
  Synthetic Construct
GKTL

SEQ ID NO: 1105 - protein, 4 aa, ARTIFICIAL SEQUENCE
  Synthetic Construct
GKTN

SEQ ID NO: 1106 - protein, 4 aa, ARTIFICIAL SEQUENCE
  Synthetic Construct
GKTQ

SEQ ID NO: 1107 - protein, 4 aa, ARTIFICIAL SEQUENCE
  Synthetic Construct
GKTR

SEQ ID NO: 1108 - protein, 4 aa, ARTIFICIAL SEQUENCE
  Synthetic Construct
GKTS

SEQ ID NO: 1109 - protein, 4 aa, ARTIFICIAL SEQUENCE
  Synthetic Construct
GKTT

SEQ ID NO: 1110 - protein, 4 aa, ARTIFICIAL SEQUENCE
  Synthetic Construct
GKTY

SEQ ID NO: 1111 - protein, 4 aa, ARTIFICIAL SEQUENCE
  Synthetic Construct
GKYA

SEQ ID NO: 1112 - protein, 4 aa, ARTIFICIAL SEQUENCE
  Synthetic Construct
GKYD

SEQ ID NO: 1113 - protein, 4 aa, ARTIFICIAL SEQUENCE
  Synthetic Construct
GKYE

SEQ ID NO: 1114 - protein, 4 aa, ARTIFICIAL SEQUENCE
  Synthetic Construct
GKYF

SEQ ID NO: 1115 - protein, 4 aa, ARTIFICIAL SEQUENCE
  Synthetic Construct
GKYG

SEQ ID NO: 1116 - protein, 4 aa, ARTIFICIAL SEQUENCE
  Synthetic Construct
GKYH

SEQ ID NO: 1117 - protein, 4 aa, ARTIFICIAL SEQUENCE
  Synthetic Construct
GKYI

SEQ ID NO: 1118 - protein, 4 aa, ARTIFICIAL SEQUENCE
  Synthetic Construct
GKYL

SEQ ID NO: 1119 - protein, 4 aa, ARTIFICIAL SEQUENCE
  Synthetic Construct
GKYN

SEQ ID NO: 1120 - protein, 4 aa, ARTIFICIAL SEQUENCE
  Synthetic Construct
GKYQ

SEQ ID NO: 1121 - protein, 4 aa, ARTIFICIAL SEQUENCE
  Synthetic Construct
GKYR

SEQ ID NO: 1122 - protein, 4 aa, ARTIFICIAL SEQUENCE
  Synthetic Construct
GKYS

SEQ ID NO: 1123 - protein, 4 aa, ARTIFICIAL SEQUENCE
  Synthetic Construct
GKYT

SEQ ID NO: 1124 - protein, 4 aa, ARTIFICIAL SEQUENCE
  Synthetic Construct
GKYY

SEQ ID NO: 1125 - protein, 4 aa, ARTIFICIAL SEQUENCE
  Synthetic Construct
HKAA

SEQ ID NO: 1126 - protein, 4 aa, ARTIFICIAL SEQUENCE
  Synthetic Construct
HKAD

SEQ ID NO: 1127 - protein, 4 aa, ARTIFICIAL SEQUENCE
  Synthetic Construct
HKAE

SEQ ID NO: 1128 - protein, 4 aa, ARTIFICIAL SEQUENCE
  Synthetic Construct
HKAF

SEQ ID NO: 1129 - protein, 4 aa, ARTIFICIAL SEQUENCE
  Synthetic Construct
HKAG

SEQ ID NO: 1130 - protein, 4 aa, ARTIFICIAL SEQUENCE
  Synthetic Construct
HKAH

SEQ ID NO: 1131 - protein, 4 aa, ARTIFICIAL SEQUENCE
  Synthetic Construct
HKAI

SEQ ID NO: 1132 - protein, 4 aa, ARTIFICIAL SEQUENCE
  Synthetic Construct
HKAL

SEQ ID NO: 1133 - protein, 4 aa, ARTIFICIAL SEQUENCE
  Synthetic Construct
HKAN

SEQ ID NO: 1134 - protein, 4 aa, ARTIFICIAL SEQUENCE
  Synthetic Construct
HKAQ

SEQ ID NO: 1135 - protein, 4 aa, ARTIFICIAL SEQUENCE
  Synthetic Construct
HKAR

SEQ ID NO: 1136 - protein, 4 aa, ARTIFICIAL SEQUENCE
  Synthetic Construct
HKAS

SEQ ID NO: 1137 - protein, 4 aa, ARTIFICIAL SEQUENCE
  Synthetic Construct
HKAT

SEQ ID NO: 1138 - protein, 4 aa, ARTIFICIAL SEQUENCE
  Synthetic Construct
HKAY

SEQ ID NO: 1139 - protein, 4 aa, ARTIFICIAL SEQUENCE
  Synthetic Construct
HKDA

SEQ ID NO: 1140 - protein, 4 aa, ARTIFICIAL SEQUENCE
  Synthetic Construct
HKDD

SEQ ID NO: 1141 - protein, 4 aa, ARTIFICIAL SEQUENCE
  Synthetic Construct
HKDE

SEQ ID NO: 1142 - protein, 4 aa, ARTIFICIAL SEQUENCE
  Synthetic Construct
HKDF

SEQ ID NO: 1143 - protein, 4 aa, ARTIFICIAL SEQUENCE
  Synthetic Construct
HKDG

SEQ ID NO: 1144 - protein, 4 aa, ARTIFICIAL SEQUENCE
  Synthetic Construct
HKDH

SEQ ID NO: 1145 - protein, 4 aa, ARTIFICIAL SEQUENCE
  Synthetic Construct
HKDI

SEQ ID NO: 1146 - protein, 4 aa, ARTIFICIAL SEQUENCE
  Synthetic Construct
HKDL

SEQ ID NO: 1147 - protein, 4 aa, ARTIFICIAL SEQUENCE
  Synthetic Construct
HKDN

SEQ ID NO: 1148 - protein, 4 aa, ARTIFICIAL SEQUENCE
  Synthetic Construct
HKDQ

SEQ ID NO: 1149 - protein, 4 aa, ARTIFICIAL SEQUENCE
  Synthetic Construct
HKDR

SEQ ID NO: 1150 - protein, 4 aa, ARTIFICIAL SEQUENCE
  Synthetic Construct
HKDS

SEQ ID NO: 1151 - protein, 4 aa, ARTIFICIAL SEQUENCE
  Synthetic Construct
HKDT

SEQ ID NO: 1152 - protein, 4 aa, ARTIFICIAL SEQUENCE
  Synthetic Construct
HKDY

SEQ ID NO: 1153 - protein, 4 aa, ARTIFICIAL SEQUENCE
  Synthetic Construct
HKEA

SEQ ID NO: 1154 - protein, 4 aa, ARTIFICIAL SEQUENCE
  Synthetic Construct
HKED

SEQ ID NO: 1155 - protein, 4 aa, ARTIFICIAL SEQUENCE
  Synthetic Construct
HKEE

SEQ ID NO: 1156 - protein, 4 aa, ARTIFICIAL SEQUENCE
  Synthetic Construct
HKEF

SEQ ID NO: 1157 - protein, 4 aa, ARTIFICIAL SEQUENCE
  Synthetic Construct
HKEG

SEQ ID NO: 1158 - protein, 4 aa, ARTIFICIAL SEQUENCE
  Synthetic Construct
HKEH

SEQ ID NO: 1159 - protein, 4 aa, ARTIFICIAL SEQUENCE
  Synthetic Construct
HKEI

SEQ ID NO: 1160 - protein, 4 aa, ARTIFICIAL SEQUENCE
  Synthetic Construct
HKEL

SEQ ID NO: 1161 - protein, 4 aa, ARTIFICIAL SEQUENCE
  Synthetic Construct
HKEN

SEQ ID NO: 1162 - protein, 4 aa, ARTIFICIAL SEQUENCE
  Synthetic Construct
HKEQ

SEQ ID NO: 1163 - protein, 4 aa, ARTIFICIAL SEQUENCE
  Synthetic Construct
HKER

SEQ ID NO: 1164 - protein, 4 aa, ARTIFICIAL SEQUENCE
  Synthetic Construct
HKES

SEQ ID NO: 1165 - protein, 4 aa, ARTIFICIAL SEQUENCE
  Synthetic Construct
HKET

SEQ ID NO: 1166 - protein, 4 aa, ARTIFICIAL SEQUENCE
  Synthetic Construct
HKEY

SEQ ID NO: 1167 - protein, 4 aa, ARTIFICIAL SEQUENCE
  Synthetic Construct
HKFA

SEQ ID NO: 1168 - protein, 4 aa, ARTIFICIAL SEQUENCE
  Synthetic Construct
HKFD

SEQ ID NO: 1169 - protein, 4 aa, ARTIFICIAL SEQUENCE
  Synthetic Construct
HKFE

SEQ ID NO: 1170 - protein, 4 aa, ARTIFICIAL SEQUENCE
  Synthetic Construct
HKFF

SEQ ID NO: 1171 - protein, 4 aa, ARTIFICIAL SEQUENCE
  Synthetic Construct
HKFG

SEQ ID NO: 1172 - protein, 4 aa, ARTIFICIAL SEQUENCE
  Synthetic Construct
HKFH

SEQ ID NO: 1173 - protein, 4 aa, ARTIFICIAL SEQUENCE
  Synthetic Construct
HKFI

SEQ ID NO: 1174 - protein, 4 aa, ARTIFICIAL SEQUENCE
  Synthetic Construct
HKFL

SEQ ID NO: 1175 - protein, 4 aa, ARTIFICIAL SEQUENCE
  Synthetic Construct
HKFN

SEQ ID NO: 1176 - protein, 4 aa, ARTIFICIAL SEQUENCE
  Synthetic Construct
HKFQ

SEQ ID NO: 1177 - protein, 4 aa, ARTIFICIAL SEQUENCE
  Synthetic Construct
HKFR

SEQ ID NO: 1178 - protein, 4 aa, ARTIFICIAL SEQUENCE
  Synthetic Construct
HKFS

SEQ ID NO: 1179 - protein, 4 aa, ARTIFICIAL SEQUENCE
  Synthetic Construct
HKFT

SEQ ID NO: 1180 - protein, 4 aa, ARTIFICIAL SEQUENCE
  Synthetic Construct
HKFY

SEQ ID NO: 1181 - protein, 4 aa, ARTIFICIAL SEQUENCE
  Synthetic Construct
HKGA

SEQ ID NO: 1182 - protein, 4 aa, ARTIFICIAL SEQUENCE
  Synthetic Construct
HKGD

SEQ ID NO: 1183 - protein, 4 aa, ARTIFICIAL SEQUENCE
  Synthetic Construct
HKGE

SEQ ID NO: 1184 - protein, 4 aa, ARTIFICIAL SEQUENCE
  Synthetic Construct
HKGF

SEQ ID NO: 1185 - protein, 4 aa, ARTIFICIAL SEQUENCE
  Synthetic Construct
HKGG

SEQ ID NO: 1186 - protein, 4 aa, ARTIFICIAL SEQUENCE
  Synthetic Construct
HKGH

SEQ ID NO: 1187 - protein, 4 aa, ARTIFICIAL SEQUENCE
  Synthetic Construct
HKGI

SEQ ID NO: 1188 - protein, 4 aa, ARTIFICIAL SEQUENCE
  Synthetic Construct
HKGL

SEQ ID NO: 1189 - protein, 4 aa, ARTIFICIAL SEQUENCE
  Synthetic Construct
HKGN

SEQ ID NO: 1190 - protein, 4 aa, ARTIFICIAL SEQUENCE
  Synthetic Construct
HKGQ

SEQ ID NO: 1191 - protein, 4 aa, ARTIFICIAL SEQUENCE
  Synthetic Construct
HKGR

SEQ ID NO: 1192 - protein, 4 aa, ARTIFICIAL SEQUENCE
  Synthetic Construct
HKGS

SEQ ID NO: 1193 - protein, 4 aa, ARTIFICIAL SEQUENCE
  Synthetic Construct
HKGT

SEQ ID NO: 1194 - protein, 4 aa, ARTIFICIAL SEQUENCE
  Synthetic Construct
HKGY

SEQ ID NO: 1195 - protein, 4 aa, ARTIFICIAL SEQUENCE
  Synthetic Construct
HKHA

SEQ ID NO: 1196 - protein, 4 aa, ARTIFICIAL SEQUENCE
  Synthetic Construct
HKHD

SEQ ID NO: 1197 - protein, 4 aa, ARTIFICIAL SEQUENCE
  Synthetic Construct
HKHE

SEQ ID NO: 1198 - protein, 4 aa, ARTIFICIAL SEQUENCE
  Synthetic Construct
HKHF

SEQ ID NO: 1199 - protein, 4 aa, ARTIFICIAL SEQUENCE
  Synthetic Construct
HKHG

SEQ ID NO: 1200 - protein, 4 aa, ARTIFICIAL SEQUENCE
  Synthetic Construct
HKHH

SEQ ID NO: 1201 - protein, 4 aa, ARTIFICIAL SEQUENCE
  Synthetic Construct
HKHI

SEQ ID NO: 1202 - protein, 4 aa, ARTIFICIAL SEQUENCE
  Synthetic Construct
HKHL

SEQ ID NO: 1203 - protein, 4 aa, ARTIFICIAL SEQUENCE
  Synthetic Construct
HKHN

SEQ ID NO: 1204 - protein, 4 aa, ARTIFICIAL SEQUENCE
  Synthetic Construct
HKHQ

SEQ ID NO: 1205 - protein, 4 aa, ARTIFICIAL SEQUENCE
  Synthetic Construct
HKHR

SEQ ID NO: 1206 - protein, 4 aa, ARTIFICIAL SEQUENCE
  Synthetic Construct
HKHS

SEQ ID NO: 1207 - protein, 4 aa, ARTIFICIAL SEQUENCE
  Synthetic Construct
HKHT

SEQ ID NO: 1208 - protein, 4 aa, ARTIFICIAL SEQUENCE
  Synthetic Construct
HKHY

SEQ ID NO: 1209 - protein, 4 aa, ARTIFICIAL SEQUENCE
  Synthetic Construct
HKIA

SEQ ID NO: 1210 - protein, 4 aa, ARTIFICIAL SEQUENCE
  Synthetic Construct
HKID

SEQ ID NO: 1211 - protein, 4 aa, ARTIFICIAL SEQUENCE
  Synthetic Construct
HKIE

SEQ ID NO: 1212 - protein, 4 aa, ARTIFICIAL SEQUENCE
  Synthetic Construct
HKIF

SEQ ID NO: 1213 - protein, 4 aa, ARTIFICIAL SEQUENCE
  Synthetic Construct
HKIG

SEQ ID NO: 1214 - protein, 4 aa, ARTIFICIAL SEQUENCE
  Synthetic Construct
HKIH

SEQ ID NO: 1215 - protein, 4 aa, ARTIFICIAL SEQUENCE
  Synthetic Construct
HKII

SEQ ID NO: 1216 - protein, 4 aa, ARTIFICIAL SEQUENCE
  Synthetic Construct
HKIL

SEQ ID NO: 1217 - protein, 4 aa, ARTIFICIAL SEQUENCE
  Synthetic Construct
HKIN

SEQ ID NO: 1218 - protein, 4 aa, ARTIFICIAL SEQUENCE
  Synthetic Construct
HKIQ

SEQ ID NO: 1219 - protein, 4 aa, ARTIFICIAL SEQUENCE
  Synthetic Construct
HKIR

SEQ ID NO: 1220 - protein, 4 aa, ARTIFICIAL SEQUENCE
  Synthetic Construct
HKIS

SEQ ID NO: 1221 - protein, 4 aa, ARTIFICIAL SEQUENCE
  Synthetic Construct
HKIT

SEQ ID NO: 1222 - protein, 4 aa, ARTIFICIAL SEQUENCE
  Synthetic Construct
HKIY

SEQ ID NO: 1223 - protein, 4 aa, ARTIFICIAL SEQUENCE
  Synthetic Construct
HKLA

SEQ ID NO: 1224 - protein, 4 aa, ARTIFICIAL SEQUENCE
  Synthetic Construct
HKLD

SEQ ID NO: 1225 - protein, 4 aa, ARTIFICIAL SEQUENCE
  Synthetic Construct
HKLE

SEQ ID NO: 1226 - protein, 4 aa, ARTIFICIAL SEQUENCE
  Synthetic Construct
HKLF

SEQ ID NO: 1227 - protein, 4 aa, ARTIFICIAL SEQUENCE
  Synthetic Construct
HKLG

SEQ ID NO: 1228 - protein, 4 aa, ARTIFICIAL SEQUENCE
  Synthetic Construct
HKLH

SEQ ID NO: 1229 - protein, 4 aa, ARTIFICIAL SEQUENCE
  Synthetic Construct
HKLI

SEQ ID NO: 1230 - protein, 4 aa, ARTIFICIAL SEQUENCE
  Synthetic Construct
HKLL

SEQ ID NO: 1231 - protein, 4 aa, ARTIFICIAL SEQUENCE
  Synthetic Construct
HKLN

SEQ ID NO: 1232 - protein, 4 aa, ARTIFICIAL SEQUENCE
  Synthetic Construct
HKLQ

SEQ ID NO: 1233 - protein, 4 aa, ARTIFICIAL SEQUENCE
  Synthetic Construct
HKLR

SEQ ID NO: 1234 - protein, 4 aa, ARTIFICIAL SEQUENCE
  Synthetic Construct
HKLS

SEQ ID NO: 1235 - protein, 4 aa, ARTIFICIAL SEQUENCE
  Synthetic Construct
HKLT

SEQ ID NO: 1236 - protein, 4 aa, ARTIFICIAL SEQUENCE
  Synthetic Construct
HKLY

SEQ ID NO: 1237 - protein, 4 aa, ARTIFICIAL SEQUENCE
  Synthetic Construct
HKNA

SEQ ID NO: 1238 - protein, 4 aa, ARTIFICIAL SEQUENCE
  Synthetic Construct
HKND

SEQ ID NO: 1239 - protein, 4 aa, ARTIFICIAL SEQUENCE
  Synthetic Construct
HKNE

SEQ ID NO: 1240 - protein, 4 aa, ARTIFICIAL SEQUENCE
  Synthetic Construct
HKNF

SEQ ID NO: 1241 - protein, 4 aa, ARTIFICIAL SEQUENCE
  Synthetic Construct
HKNG

SEQ ID NO: 1242 - protein, 4 aa, ARTIFICIAL SEQUENCE
  Synthetic Construct
HKNH

SEQ ID NO: 1243 - protein, 4 aa, ARTIFICIAL SEQUENCE
  Synthetic Construct
HKNI

SEQ ID NO: 1244 - protein, 4 aa, ARTIFICIAL SEQUENCE
  Synthetic Construct
HKNL

SEQ ID NO: 1245 - protein, 4 aa, ARTIFICIAL SEQUENCE
  Synthetic Construct
HKNN

SEQ ID NO: 1246 - protein, 4 aa, ARTIFICIAL SEQUENCE
  Synthetic Construct
HKNQ

SEQ ID NO: 1247 - protein, 4 aa, ARTIFICIAL SEQUENCE
  Synthetic Construct
HKNR

SEQ ID NO: 1248 - protein, 4 aa, ARTIFICIAL SEQUENCE
  Synthetic Construct
HKNS

SEQ ID NO: 1249 - protein, 4 aa, ARTIFICIAL SEQUENCE
  Synthetic Construct
HKNT

SEQ ID NO: 1250 - protein, 4 aa, ARTIFICIAL SEQUENCE
  Synthetic Construct
HKNY

SEQ ID NO: 1251 - protein, 4 aa, ARTIFICIAL SEQUENCE
  Synthetic Construct
HKPA

SEQ ID NO: 1252 - protein, 4 aa, ARTIFICIAL SEQUENCE
  Synthetic Construct
HKPD

SEQ ID NO: 1253 - protein, 4 aa, ARTIFICIAL SEQUENCE
  Synthetic Construct
HKPE

SEQ ID NO: 1254 - protein, 4 aa, ARTIFICIAL SEQUENCE
  Synthetic Construct
HKPF

SEQ ID NO: 1255 - protein, 4 aa, ARTIFICIAL SEQUENCE
  Synthetic Construct
HKPG

SEQ ID NO: 1256 - protein, 4 aa, ARTIFICIAL SEQUENCE
  Synthetic Construct
HKPH

SEQ ID NO: 1257 - protein, 4 aa, ARTIFICIAL SEQUENCE
  Synthetic Construct
HKPI

SEQ ID NO: 1258 - protein, 4 aa, ARTIFICIAL SEQUENCE
  Synthetic Construct
HKPL

SEQ ID NO: 1259 - protein, 4 aa, ARTIFICIAL SEQUENCE
  Synthetic Construct
HKPN

SEQ ID NO: 1260 - protein, 4 aa, ARTIFICIAL SEQUENCE
  Synthetic Construct
HKPQ

SEQ ID NO: 1261 - protein, 4 aa, ARTIFICIAL SEQUENCE
  Synthetic Construct
HKPR

SEQ ID NO: 1262 - protein, 4 aa, ARTIFICIAL SEQUENCE
  Synthetic Construct
HKPS

SEQ ID NO: 1263 - protein, 4 aa, ARTIFICIAL SEQUENCE
  Synthetic Construct
HKPT

SEQ ID NO: 1264 - protein, 4 aa, ARTIFICIAL SEQUENCE
  Synthetic Construct
HKPY

SEQ ID NO: 1265 - protein, 4 aa, ARTIFICIAL SEQUENCE
  Synthetic Construct
HKQA

SEQ ID NO: 1266 - protein, 4 aa, ARTIFICIAL SEQUENCE
  Synthetic Construct
HKQD

SEQ ID NO: 1267 - protein, 4 aa, ARTIFICIAL SEQUENCE
  Synthetic Construct
HKQE

SEQ ID NO: 1268 - protein, 4 aa, ARTIFICIAL SEQUENCE
  Synthetic Construct
HKQF

SEQ ID NO: 1269 - protein, 4 aa, ARTIFICIAL SEQUENCE
  Synthetic Construct
HKQG

SEQ ID NO: 1270 - protein, 4 aa, ARTIFICIAL SEQUENCE
  Synthetic Construct
HKQH

SEQ ID NO: 1271 - protein, 4 aa, ARTIFICIAL SEQUENCE
  Synthetic Construct
HKQI

SEQ ID NO: 1272 - protein, 4 aa, ARTIFICIAL SEQUENCE
  Synthetic Construct
HKQL

SEQ ID NO: 1273 - protein, 4 aa, ARTIFICIAL SEQUENCE
  Synthetic Construct
HKQN

SEQ ID NO: 1274 - protein, 4 aa, ARTIFICIAL SEQUENCE
  Synthetic Construct
HKQQ

SEQ ID NO: 1275 - protein, 4 aa, ARTIFICIAL SEQUENCE
  Synthetic Construct
HKQR

SEQ ID NO: 1276 - protein, 4 aa, ARTIFICIAL SEQUENCE
  Synthetic Construct
HKQS

SEQ ID NO: 1277 - protein, 4 aa, ARTIFICIAL SEQUENCE
  Synthetic Construct
HKQT

SEQ ID NO: 1278 - protein, 4 aa, ARTIFICIAL SEQUENCE
  Synthetic Construct
HKQY

SEQ ID NO: 1279 - protein, 4 aa, ARTIFICIAL SEQUENCE
  Synthetic Construct
HKRA

SEQ ID NO: 1280 - protein, 4 aa, ARTIFICIAL SEQUENCE
  Synthetic Construct
HKRD

SEQ ID NO: 1281 - protein, 4 aa, ARTIFICIAL SEQUENCE
  Synthetic Construct
HKRE

SEQ ID NO: 1282 - protein, 4 aa, ARTIFICIAL SEQUENCE
  Synthetic Construct
HKRF

SEQ ID NO: 1283 - protein, 4 aa, ARTIFICIAL SEQUENCE
  Synthetic Construct
HKRG

SEQ ID NO: 1284 - protein, 4 aa, ARTIFICIAL SEQUENCE
  Synthetic Construct
HKRH

SEQ ID NO: 1285 - protein, 4 aa, ARTIFICIAL SEQUENCE
  Synthetic Construct
HKRI

SEQ ID NO: 1286 - protein, 4 aa, ARTIFICIAL SEQUENCE
  Synthetic Construct
HKRL

SEQ ID NO: 1287 - protein, 4 aa, ARTIFICIAL SEQUENCE
  Synthetic Construct
HKRN

SEQ ID NO: 1288 - protein, 4 aa, ARTIFICIAL SEQUENCE
  Synthetic Construct
HKRQ

SEQ ID NO: 1289 - protein, 4 aa, ARTIFICIAL SEQUENCE
  Synthetic Construct
HKRR

SEQ ID NO: 1290 - protein, 4 aa, ARTIFICIAL SEQUENCE
  Synthetic Construct
HKRS

SEQ ID NO: 1291 - protein, 4 aa, ARTIFICIAL SEQUENCE
  Synthetic Construct
HKRT

SEQ ID NO: 1292 - protein, 4 aa, ARTIFICIAL SEQUENCE
  Synthetic Construct
HKRY

SEQ ID NO: 1293 - protein, 4 aa, ARTIFICIAL SEQUENCE
  Synthetic Construct
HKSA

SEQ ID NO: 1294 - protein, 4 aa, ARTIFICIAL SEQUENCE
  Synthetic Construct
HKSD

SEQ ID NO: 1295 - protein, 4 aa, ARTIFICIAL SEQUENCE
  Synthetic Construct
HKSE

SEQ ID NO: 1296 - protein, 4 aa, ARTIFICIAL SEQUENCE
  Synthetic Construct
HKSF

SEQ ID NO: 1297 - protein, 4 aa, ARTIFICIAL SEQUENCE
  Synthetic Construct
HKSG

SEQ ID NO: 1298 - protein, 4 aa, ARTIFICIAL SEQUENCE
  Synthetic Construct
HKSH

SEQ ID NO: 1299 - protein, 4 aa, ARTIFICIAL SEQUENCE
  Synthetic Construct
HKSI

SEQ ID NO: 1300 - protein, 4 aa, ARTIFICIAL SEQUENCE
  Synthetic Construct
HKSL

SEQ ID NO: 1301 - protein, 4 aa, ARTIFICIAL SEQUENCE
  Synthetic Construct
HKSN

SEQ ID NO: 1302 - protein, 4 aa, ARTIFICIAL SEQUENCE
  Synthetic Construct
HKSQ

SEQ ID NO: 1303 - protein, 4 aa, ARTIFICIAL SEQUENCE
  Synthetic Construct
HKSR

SEQ ID NO: 1304 - protein, 4 aa, ARTIFICIAL SEQUENCE
  Synthetic Construct
HKSS

SEQ ID NO: 1305 - protein, 4 aa, ARTIFICIAL SEQUENCE
  Synthetic Construct
HKST

SEQ ID NO: 1306 - protein, 4 aa, ARTIFICIAL SEQUENCE
  Synthetic Construct
HKSY

SEQ ID NO: 1307 - protein, 4 aa, ARTIFICIAL SEQUENCE
  Synthetic Construct
HKTA

SEQ ID NO: 1308 - protein, 4 aa, ARTIFICIAL SEQUENCE
  Synthetic Construct
HKTD

SEQ ID NO: 1309 - protein, 4 aa, ARTIFICIAL SEQUENCE
  Synthetic Construct
HKTE

SEQ ID NO: 1310 - protein, 4 aa, ARTIFICIAL SEQUENCE
  Synthetic Construct
HKTF

SEQ ID NO: 1311 - protein, 4 aa, ARTIFICIAL SEQUENCE
  Synthetic Construct
HKTG

SEQ ID NO: 1312 - protein, 4 aa, ARTIFICIAL SEQUENCE
  Synthetic Construct
HKTH

SEQ ID NO: 1313 - protein, 4 aa, ARTIFICIAL SEQUENCE
  Synthetic Construct
HKTI

SEQ ID NO: 1314 - protein, 4 aa, ARTIFICIAL SEQUENCE
  Synthetic Construct
HKTL

SEQ ID NO: 1315 - protein, 4 aa, ARTIFICIAL SEQUENCE
  Synthetic Construct
HKTN

SEQ ID NO: 1316 - protein, 4 aa, ARTIFICIAL SEQUENCE
  Synthetic Construct
HKTQ

SEQ ID NO: 1317 - protein, 4 aa, ARTIFICIAL SEQUENCE
  Synthetic Construct
HKTR

SEQ ID NO: 1318 - protein, 4 aa, ARTIFICIAL SEQUENCE
  Synthetic Construct
HKTS

SEQ ID NO: 1319 - protein, 4 aa, ARTIFICIAL SEQUENCE
  Synthetic Construct
HKTT

SEQ ID NO: 1320 - protein, 4 aa, ARTIFICIAL SEQUENCE
  Synthetic Construct
HKTY

SEQ ID NO: 1321 - protein, 4 aa, ARTIFICIAL SEQUENCE
  Synthetic Construct
HKYA

SEQ ID NO: 1322 - protein, 4 aa, ARTIFICIAL SEQUENCE
  Synthetic Construct
HKYD

SEQ ID NO: 1323 - protein, 4 aa, ARTIFICIAL SEQUENCE
  Synthetic Construct
HKYE

SEQ ID NO: 1324 - protein, 4 aa, ARTIFICIAL SEQUENCE
  Synthetic Construct
HKYF

SEQ ID NO: 1325 - protein, 4 aa, ARTIFICIAL SEQUENCE
  Synthetic Construct
HKYG

SEQ ID NO: 1326 - protein, 4 aa, ARTIFICIAL SEQUENCE
  Synthetic Construct
HKYH

SEQ ID NO: 1327 - protein, 4 aa, ARTIFICIAL SEQUENCE
  Synthetic Construct
HKYI

SEQ ID NO: 1328 - protein, 4 aa, ARTIFICIAL SEQUENCE
  Synthetic Construct
HKYL

SEQ ID NO: 1329 - protein, 4 aa, ARTIFICIAL SEQUENCE
  Synthetic Construct
HKYN

SEQ ID NO: 1330 - protein, 4 aa, ARTIFICIAL SEQUENCE
  Synthetic Construct
HKYQ

SEQ ID NO: 1331 - protein, 4 aa, ARTIFICIAL SEQUENCE
  Synthetic Construct
HKYR

SEQ ID NO: 1332 - protein, 4 aa, ARTIFICIAL SEQUENCE
  Synthetic Construct
HKYS

SEQ ID NO: 1333 - protein, 4 aa, ARTIFICIAL SEQUENCE
  Synthetic Construct
HKYT

SEQ ID NO: 1334 - protein, 4 aa, ARTIFICIAL SEQUENCE
  Synthetic Construct
HKYY

SEQ ID NO: 1335 - protein, 4 aa, ARTIFICIAL SEQUENCE
  Synthetic Construct
IKAA

SEQ ID NO: 1336 - protein, 4 aa, ARTIFICIAL SEQUENCE
  Synthetic Construct
IKAD

SEQ ID NO: 1337 - protein, 4 aa, ARTIFICIAL SEQUENCE
  Synthetic Construct
IKAE

SEQ ID NO: 1338 - protein, 4 aa, ARTIFICIAL SEQUENCE
  Synthetic Construct
IKAF

SEQ ID NO: 1339 - protein, 4 aa, ARTIFICIAL SEQUENCE
  Synthetic Construct
IKAG

SEQ ID NO: 1340 - protein, 4 aa, ARTIFICIAL SEQUENCE
  Synthetic Construct
IKAH

SEQ ID NO: 1341 - protein, 4 aa, ARTIFICIAL SEQUENCE
  Synthetic Construct
IKAI

SEQ ID NO: 1342 - protein, 4 aa, ARTIFICIAL SEQUENCE
  Synthetic Construct
IKAL

SEQ ID NO: 1343 - protein, 4 aa, ARTIFICIAL SEQUENCE
  Synthetic Construct
IKAN

SEQ ID NO: 1344 - protein, 4 aa, ARTIFICIAL SEQUENCE
  Synthetic Construct
IKAQ

SEQ ID NO: 1345 - protein, 4 aa, ARTIFICIAL SEQUENCE
  Synthetic Construct
IKAR

SEQ ID NO: 1346 - protein, 4 aa, ARTIFICIAL SEQUENCE
  Synthetic Construct
IKAS

SEQ ID NO: 1347 - protein, 4 aa, ARTIFICIAL SEQUENCE
  Synthetic Construct
IKAT

SEQ ID NO: 1348 - protein, 4 aa, ARTIFICIAL SEQUENCE
  Synthetic Construct
IKAY

SEQ ID NO: 1349 - protein, 4 aa, ARTIFICIAL SEQUENCE
  Synthetic Construct
IKDA

SEQ ID NO: 1350 - protein, 4 aa, ARTIFICIAL SEQUENCE
  Synthetic Construct
IKDD

SEQ ID NO: 1351 - protein, 4 aa, ARTIFICIAL SEQUENCE
  Synthetic Construct
IKDE

SEQ ID NO: 1352 - protein, 4 aa, ARTIFICIAL SEQUENCE
  Synthetic Construct
IKDF

SEQ ID NO: 1353 - protein, 4 aa, ARTIFICIAL SEQUENCE
  Synthetic Construct
IKDG

SEQ ID NO: 1354 - protein, 4 aa, ARTIFICIAL SEQUENCE
  Synthetic Construct
IKDH

SEQ ID NO: 1355 - protein, 4 aa, ARTIFICIAL SEQUENCE
  Synthetic Construct
IKDI

SEQ ID NO: 1356 - protein, 4 aa, ARTIFICIAL SEQUENCE
  Synthetic Construct
IKDL

SEQ ID NO: 1357 - protein, 4 aa, ARTIFICIAL SEQUENCE
  Synthetic Construct
IKDN

SEQ ID NO: 1358 - protein, 4 aa, ARTIFICIAL SEQUENCE
  Synthetic Construct
IKDQ

SEQ ID NO: 1359 - protein, 4 aa, ARTIFICIAL SEQUENCE
  Synthetic Construct
IKDR

SEQ ID NO: 1360 - protein, 4 aa, ARTIFICIAL SEQUENCE
  Synthetic Construct
IKDS

SEQ ID NO: 1361 - protein, 4 aa, ARTIFICIAL SEQUENCE
  Synthetic Construct
IKDT

SEQ ID NO: 1362 - protein, 4 aa, ARTIFICIAL SEQUENCE
  Synthetic Construct
IKDY

SEQ ID NO: 1363 - protein, 4 aa, ARTIFICIAL SEQUENCE
  Synthetic Construct
IKEA

SEQ ID NO: 1364 - protein, 4 aa, ARTIFICIAL SEQUENCE
  Synthetic Construct
IKED

SEQ ID NO: 1365 - protein, 4 aa, ARTIFICIAL SEQUENCE
  Synthetic Construct
IKEE

SEQ ID NO: 1366 - protein, 4 aa, ARTIFICIAL SEQUENCE
  Synthetic Construct
IKEF

SEQ ID NO: 1367 - protein, 4 aa, ARTIFICIAL SEQUENCE
  Synthetic Construct
IKEG

SEQ ID NO: 1368 - protein, 4 aa, ARTIFICIAL SEQUENCE
  Synthetic Construct
IKEH

SEQ ID NO: 1369 - protein, 4 aa, ARTIFICIAL SEQUENCE
  Synthetic Construct
IKEI

SEQ ID NO: 1370 - protein, 4 aa, ARTIFICIAL SEQUENCE
  Synthetic Construct
IKEL

SEQ ID NO: 1371 - protein, 4 aa, ARTIFICIAL SEQUENCE
  Synthetic Construct
IKEN

SEQ ID NO: 1372 - protein, 4 aa, ARTIFICIAL SEQUENCE
  Synthetic Construct
IKEQ

SEQ ID NO: 1373 - protein, 4 aa, ARTIFICIAL SEQUENCE
  Synthetic Construct
IKER

SEQ ID NO: 1374 - protein, 4 aa, ARTIFICIAL SEQUENCE
  Synthetic Construct
IKES

SEQ ID NO: 1375 - protein, 4 aa, ARTIFICIAL SEQUENCE
  Synthetic Construct
IKET

SEQ ID NO: 1376 - protein, 4 aa, ARTIFICIAL SEQUENCE
  Synthetic Construct
IKEY

SEQ ID NO: 1377 - protein, 4 aa, ARTIFICIAL SEQUENCE
  Synthetic Construct
IKFA

SEQ ID NO: 1378 - protein, 4 aa, ARTIFICIAL SEQUENCE
  Synthetic Construct
IKFD

SEQ ID NO: 1379 - protein, 4 aa, ARTIFICIAL SEQUENCE
  Synthetic Construct
IKFE

SEQ ID NO: 1380 - protein, 4 aa, ARTIFICIAL SEQUENCE
  Synthetic Construct
IKFF

SEQ ID NO: 1381 - protein, 4 aa, ARTIFICIAL SEQUENCE
  Synthetic Construct
IKFG

SEQ ID NO: 1382 - protein, 4 aa, ARTIFICIAL SEQUENCE
  Synthetic Construct
IKFH

SEQ ID NO: 1383 - protein, 4 aa, ARTIFICIAL SEQUENCE
  Synthetic Construct
IKFI

SEQ ID NO: 1384 - protein, 4 aa, ARTIFICIAL SEQUENCE
  Synthetic Construct
IKFL

SEQ ID NO: 1385 - protein, 4 aa, ARTIFICIAL SEQUENCE
  Synthetic Construct
IKFN

SEQ ID NO: 1386 - protein, 4 aa, ARTIFICIAL SEQUENCE
  Synthetic Construct
IKFQ

SEQ ID NO: 1387 - protein, 4 aa, ARTIFICIAL SEQUENCE
  Synthetic Construct
IKFR

SEQ ID NO: 1388 - protein, 4 aa, ARTIFICIAL SEQUENCE
  Synthetic Construct
IKFS

SEQ ID NO: 1389 - protein, 4 aa, ARTIFICIAL SEQUENCE
  Synthetic Construct
IKFT

SEQ ID NO: 1390 - protein, 4 aa, ARTIFICIAL SEQUENCE
  Synthetic Construct
IKFY

SEQ ID NO: 1391 - protein, 4 aa, ARTIFICIAL SEQUENCE
  Synthetic Construct
IKGA

SEQ ID NO: 1392 - protein, 4 aa, ARTIFICIAL SEQUENCE
  Synthetic Construct
IKGD

SEQ ID NO: 1393 - protein, 4 aa, ARTIFICIAL SEQUENCE
  Synthetic Construct
IKGE

SEQ ID NO: 1394 - protein, 4 aa, ARTIFICIAL SEQUENCE
  Synthetic Construct
IKGF

SEQ ID NO: 1395 - protein, 4 aa, ARTIFICIAL SEQUENCE
  Synthetic Construct
IKGG

SEQ ID NO: 1396 - protein, 4 aa, ARTIFICIAL SEQUENCE
  Synthetic Construct
IKGH

SEQ ID NO: 1397 - protein, 4 aa, ARTIFICIAL SEQUENCE
  Synthetic Construct
IKGI

SEQ ID NO: 1398 - protein, 4 aa, ARTIFICIAL SEQUENCE
  Synthetic Construct
IKGL

SEQ ID NO: 1399 - protein, 4 aa, ARTIFICIAL SEQUENCE
  Synthetic Construct
IKGN

SEQ ID NO: 1400 - protein, 4 aa, ARTIFICIAL SEQUENCE
  Synthetic Construct
IKGQ

SEQ ID NO: 1401 - protein, 4 aa, ARTIFICIAL SEQUENCE
  Synthetic Construct
IKGR

SEQ ID NO: 1402 - protein, 4 aa, ARTIFICIAL SEQUENCE
  Synthetic Construct
IKGS

SEQ ID NO: 1403 - protein, 4 aa, ARTIFICIAL SEQUENCE
  Synthetic Construct
IKGT

SEQ ID NO: 1404 - protein, 4 aa, ARTIFICIAL SEQUENCE
  Synthetic Construct
IKGY

SEQ ID NO: 1405 - protein, 4 aa, ARTIFICIAL SEQUENCE
  Synthetic Construct
IKHA

SEQ ID NO: 1406 - protein, 4 aa, ARTIFICIAL SEQUENCE
  Synthetic Construct
IKHD

SEQ ID NO: 1407 - protein, 4 aa, ARTIFICIAL SEQUENCE
  Synthetic Construct
IKHE

SEQ ID NO: 1408 - protein, 4 aa, ARTIFICIAL SEQUENCE
  Synthetic Construct
IKHF

SEQ ID NO: 1409 - protein, 4 aa, ARTIFICIAL SEQUENCE
  Synthetic Construct
IKHG

SEQ ID NO: 1410 - protein, 4 aa, ARTIFICIAL SEQUENCE
  Synthetic Construct
IKHH

SEQ ID NO: 1411 - protein, 4 aa, ARTIFICIAL SEQUENCE
  Synthetic Construct
IKHI

SEQ ID NO: 1412 - protein, 4 aa, ARTIFICIAL SEQUENCE
  Synthetic Construct
IKHL

SEQ ID NO: 1413 - protein, 4 aa, ARTIFICIAL SEQUENCE
  Synthetic Construct
IKHN

SEQ ID NO: 1414 - protein, 4 aa, ARTIFICIAL SEQUENCE
  Synthetic Construct
IKHQ

SEQ ID NO: 1415 - protein, 4 aa, ARTIFICIAL SEQUENCE
  Synthetic Construct
IKHR

SEQ ID NO: 1416 - protein, 4 aa, ARTIFICIAL SEQUENCE
  Synthetic Construct
IKHS

SEQ ID NO: 1417 - protein, 4 aa, ARTIFICIAL SEQUENCE
  Synthetic Construct
IKHT

SEQ ID NO: 1418 - protein, 4 aa, ARTIFICIAL SEQUENCE
  Synthetic Construct
IKHY

SEQ ID NO: 1419 - protein, 4 aa, ARTIFICIAL SEQUENCE
  Synthetic Construct
IKIA

SEQ ID NO: 1420 - protein, 4 aa, ARTIFICIAL SEQUENCE
  Synthetic Construct
IKID

SEQ ID NO: 1421 - protein, 4 aa, ARTIFICIAL SEQUENCE
  Synthetic Construct
IKIE

SEQ ID NO: 1422 - protein, 4 aa, ARTIFICIAL SEQUENCE
  Synthetic Construct
IKIF

SEQ ID NO: 1423 - protein, 4 aa, ARTIFICIAL SEQUENCE
  Synthetic Construct
IKIG

SEQ ID NO: 1424 - protein, 4 aa, ARTIFICIAL SEQUENCE
  Synthetic Construct
IKIH

SEQ ID NO: 1425 - protein, 4 aa, ARTIFICIAL SEQUENCE
  Synthetic Construct
IKII

SEQ ID NO: 1426 - protein, 4 aa, ARTIFICIAL SEQUENCE
  Synthetic Construct
IKIL

SEQ ID NO: 1427 - protein, 4 aa, ARTIFICIAL SEQUENCE
  Synthetic Construct
IKIN

SEQ ID NO: 1428 - protein, 4 aa, ARTIFICIAL SEQUENCE
  Synthetic Construct
IKIQ

SEQ ID NO: 1429 - protein, 4 aa, ARTIFICIAL SEQUENCE
  Synthetic Construct
IKIR

SEQ ID NO: 1430 - protein, 4 aa, ARTIFICIAL SEQUENCE
  Synthetic Construct
IKIS

SEQ ID NO: 1431 - protein, 4 aa, ARTIFICIAL SEQUENCE
  Synthetic Construct
IKIT

SEQ ID NO: 1432 - protein, 4 aa, ARTIFICIAL SEQUENCE
  Synthetic Construct
IKIY

SEQ ID NO: 1433 - protein, 4 aa, ARTIFICIAL SEQUENCE
  Synthetic Construct
IKLA

SEQ ID NO: 1434 - protein, 4 aa, ARTIFICIAL SEQUENCE
  Synthetic Construct
IKLD

SEQ ID NO: 1435 - protein, 4 aa, ARTIFICIAL SEQUENCE
  Synthetic Construct
IKLE

SEQ ID NO: 1436 - protein, 4 aa, ARTIFICIAL SEQUENCE
  Synthetic Construct
IKLF

SEQ ID NO: 1437 - protein, 4 aa, ARTIFICIAL SEQUENCE
  Synthetic Construct
IKLG

SEQ ID NO: 1438 - protein, 4 aa, ARTIFICIAL SEQUENCE
  Synthetic Construct
IKLH

SEQ ID NO: 1439 - protein, 4 aa, ARTIFICIAL SEQUENCE
  Synthetic Construct
IKLI

SEQ ID NO: 1440 - protein, 4 aa, ARTIFICIAL SEQUENCE
  Synthetic Construct
IKLL

SEQ ID NO: 1441 - protein, 4 aa, ARTIFICIAL SEQUENCE
  Synthetic Construct
IKLN

SEQ ID NO: 1442 - protein, 4 aa, ARTIFICIAL SEQUENCE
  Synthetic Construct
IKLQ

SEQ ID NO: 1443 - protein, 4 aa, ARTIFICIAL SEQUENCE
  Synthetic Construct
IKLR

SEQ ID NO: 1444 - protein, 4 aa, ARTIFICIAL SEQUENCE
  Synthetic Construct
IKLS

SEQ ID NO: 1445 - protein, 4 aa, ARTIFICIAL SEQUENCE
  Synthetic Construct
IKLT

SEQ ID NO: 1446 - protein, 4 aa, ARTIFICIAL SEQUENCE
  Synthetic Construct
IKLY

SEQ ID NO: 1447 - protein, 4 aa, ARTIFICIAL SEQUENCE
  Synthetic Construct
IKNA

SEQ ID NO: 1448 - protein, 4 aa, ARTIFICIAL SEQUENCE
  Synthetic Construct
IKND

SEQ ID NO: 1449 - protein, 4 aa, ARTIFICIAL SEQUENCE
  Synthetic Construct
IKNE

SEQ ID NO: 1450 - protein, 4 aa, ARTIFICIAL SEQUENCE
  Synthetic Construct
IKNF

SEQ ID NO: 1451 - protein, 4 aa, ARTIFICIAL SEQUENCE
  Synthetic Construct
IKNG

SEQ ID NO: 1452 - protein, 4 aa, ARTIFICIAL SEQUENCE
  Synthetic Construct
IKNH

SEQ ID NO: 1453 - protein, 4 aa, ARTIFICIAL SEQUENCE
  Synthetic Construct
IKNI

SEQ ID NO: 1454 - protein, 4 aa, ARTIFICIAL SEQUENCE
  Synthetic Construct
IKNL

SEQ ID NO: 1455 - protein, 4 aa, ARTIFICIAL SEQUENCE
  Synthetic Construct
IKNN

SEQ ID NO: 1456 - protein, 4 aa, ARTIFICIAL SEQUENCE
  Synthetic Construct
IKNQ

SEQ ID NO: 1457 - protein, 4 aa, ARTIFICIAL SEQUENCE
  Synthetic Construct
IKNR

SEQ ID NO: 1458 - protein, 4 aa, ARTIFICIAL SEQUENCE
  Synthetic Construct
IKNS

SEQ ID NO: 1459 - protein, 4 aa, ARTIFICIAL SEQUENCE
  Synthetic Construct
IKNT

SEQ ID NO: 1460 - protein, 4 aa, ARTIFICIAL SEQUENCE
  Synthetic Construct
IKNY

SEQ ID NO: 1461 - protein, 4 aa, ARTIFICIAL SEQUENCE
  Synthetic Construct
IKPA

SEQ ID NO: 1462 - protein, 4 aa, ARTIFICIAL SEQUENCE
  Synthetic Construct
IKPD

SEQ ID NO: 1463 - protein, 4 aa, ARTIFICIAL SEQUENCE
  Synthetic Construct
IKPE

SEQ ID NO: 1464 - protein, 4 aa, ARTIFICIAL SEQUENCE
  Synthetic Construct
IKPF

SEQ ID NO: 1465 - protein, 4 aa, ARTIFICIAL SEQUENCE
  Synthetic Construct
IKPG

SEQ ID NO: 1466 - protein, 4 aa, ARTIFICIAL SEQUENCE
  Synthetic Construct
IKPH

SEQ ID NO: 1467 - protein, 4 aa, ARTIFICIAL SEQUENCE
  Synthetic Construct
IKPI

SEQ ID NO: 1468 - protein, 4 aa, ARTIFICIAL SEQUENCE
  Synthetic Construct
IKPL

SEQ ID NO: 1469 - protein, 4 aa, ARTIFICIAL SEQUENCE
  Synthetic Construct
IKPN

SEQ ID NO: 1470 - protein, 4 aa, ARTIFICIAL SEQUENCE
  Synthetic Construct
IKPQ

SEQ ID NO: 1471 - protein, 4 aa, ARTIFICIAL SEQUENCE
  Synthetic Construct
IKPR

SEQ ID NO: 1472 - protein, 4 aa, ARTIFICIAL SEQUENCE
  Synthetic Construct
IKPS

SEQ ID NO: 1473 - protein, 4 aa, ARTIFICIAL SEQUENCE
  Synthetic Construct
IKPT

SEQ ID NO: 1474 - protein, 4 aa, ARTIFICIAL SEQUENCE
  Synthetic Construct
IKPY

SEQ ID NO: 1475 - protein, 4 aa, ARTIFICIAL SEQUENCE
  Synthetic Construct
IKQA

SEQ ID NO: 1476 - protein, 4 aa, ARTIFICIAL SEQUENCE
  Synthetic Construct
IKQD

SEQ ID NO: 1477 - protein, 4 aa, ARTIFICIAL SEQUENCE
  Synthetic Construct
IKQE

SEQ ID NO: 1478 - protein, 4 aa, ARTIFICIAL SEQUENCE
  Synthetic Construct
IKQF

SEQ ID NO: 1479 - protein, 4 aa, ARTIFICIAL SEQUENCE
  Synthetic Construct
IKQG

SEQ ID NO: 1480 - protein, 4 aa, ARTIFICIAL SEQUENCE
  Synthetic Construct
IKQH

SEQ ID NO: 1481 - protein, 4 aa, ARTIFICIAL SEQUENCE
  Synthetic Construct
IKQI

SEQ ID NO: 1482 - protein, 4 aa, ARTIFICIAL SEQUENCE
  Synthetic Construct
IKQL

SEQ ID NO: 1483 - protein, 4 aa, ARTIFICIAL SEQUENCE
  Synthetic Construct
IKQN

SEQ ID NO: 1484 - protein, 4 aa, ARTIFICIAL SEQUENCE
  Synthetic Construct
IKQQ

SEQ ID NO: 1485 - protein, 4 aa, ARTIFICIAL SEQUENCE
  Synthetic Construct
IKQR

SEQ ID NO: 1486 - protein, 4 aa, ARTIFICIAL SEQUENCE
  Synthetic Construct
IKQS

SEQ ID NO: 1487 - protein, 4 aa, ARTIFICIAL SEQUENCE
  Synthetic Construct
IKQT

SEQ ID NO: 1488 - protein, 4 aa, ARTIFICIAL SEQUENCE
  Synthetic Construct
IKQY

SEQ ID NO: 1489 - protein, 4 aa, ARTIFICIAL SEQUENCE
  Synthetic Construct
IKRA

SEQ ID NO: 1490 - protein, 4 aa, ARTIFICIAL SEQUENCE
  Synthetic Construct
IKRD

SEQ ID NO: 1491 - protein, 4 aa, ARTIFICIAL SEQUENCE
  Synthetic Construct
IKRE

SEQ ID NO: 1492 - protein, 4 aa, ARTIFICIAL SEQUENCE
  Synthetic Construct
IKRF

SEQ ID NO: 1493 - protein, 4 aa, ARTIFICIAL SEQUENCE
  Synthetic Construct
IKRG

SEQ ID NO: 1494 - protein, 4 aa, ARTIFICIAL SEQUENCE
  Synthetic Construct
IKRH

SEQ ID NO: 1495 - protein, 4 aa, ARTIFICIAL SEQUENCE
  Synthetic Construct
IKRI

SEQ ID NO: 1496 - protein, 4 aa, ARTIFICIAL SEQUENCE
  Synthetic Construct
IKRL

SEQ ID NO: 1497 - protein, 4 aa, ARTIFICIAL SEQUENCE
  Synthetic Construct
IKRN

SEQ ID NO: 1498 - protein, 4 aa, ARTIFICIAL SEQUENCE
  Synthetic Construct
IKRQ

SEQ ID NO: 1499 - protein, 4 aa, ARTIFICIAL SEQUENCE
  Synthetic Construct
IKRR

SEQ ID NO: 1500 - protein, 4 aa, ARTIFICIAL SEQUENCE
  Synthetic Construct
IKRS

SEQ ID NO: 1501 - protein, 4 aa, ARTIFICIAL SEQUENCE
  Synthetic Construct
IKRT

SEQ ID NO: 1502 - protein, 4 aa, ARTIFICIAL SEQUENCE
  Synthetic Construct
IKRY

SEQ ID NO: 1503 - protein, 4 aa, ARTIFICIAL SEQUENCE
  Synthetic Construct
IKSA

SEQ ID NO: 1504 - protein, 4 aa, ARTIFICIAL SEQUENCE
  Synthetic Construct
IKSD

SEQ ID NO: 1505 - protein, 4 aa, ARTIFICIAL SEQUENCE
  Synthetic Construct
IKSE

SEQ ID NO: 1506 - protein, 4 aa, ARTIFICIAL SEQUENCE
  Synthetic Construct
IKSF

SEQ ID NO: 1507 - protein, 4 aa, ARTIFICIAL SEQUENCE
  Synthetic Construct
IKSG

SEQ ID NO: 1508 - protein, 4 aa, ARTIFICIAL SEQUENCE
  Synthetic Construct
IKSH

SEQ ID NO: 1509 - protein, 4 aa, ARTIFICIAL SEQUENCE
  Synthetic Construct
IKSI

SEQ ID NO: 1510 - protein, 4 aa, ARTIFICIAL SEQUENCE
  Synthetic Construct
IKSL

SEQ ID NO: 1511 - protein, 4 aa, ARTIFICIAL SEQUENCE
  Synthetic Construct
IKSN

SEQ ID NO: 1512 - protein, 4 aa, ARTIFICIAL SEQUENCE
  Synthetic Construct
IKSQ

SEQ ID NO: 1513 - protein, 4 aa, ARTIFICIAL SEQUENCE
  Synthetic Construct
IKSR

SEQ ID NO: 1514 - protein, 4 aa, ARTIFICIAL SEQUENCE
  Synthetic Construct
IKSS

SEQ ID NO: 1515 - protein, 4 aa, ARTIFICIAL SEQUENCE
  Synthetic Construct
IKST

SEQ ID NO: 1516 - protein, 4 aa, ARTIFICIAL SEQUENCE
  Synthetic Construct
IKSY

SEQ ID NO: 1517 - protein, 4 aa, ARTIFICIAL SEQUENCE
  Synthetic Construct
IKTA

SEQ ID NO: 1518 - protein, 4 aa, ARTIFICIAL SEQUENCE
  Synthetic Construct
IKTD

SEQ ID NO: 1519 - protein, 4 aa, ARTIFICIAL SEQUENCE
  Synthetic Construct
IKTE

SEQ ID NO: 1520 - protein, 4 aa, ARTIFICIAL SEQUENCE
  Synthetic Construct
IKTF

SEQ ID NO: 1521 - protein, 4 aa, ARTIFICIAL SEQUENCE
  Synthetic Construct
IKTG

SEQ ID NO: 1522 - protein, 4 aa, ARTIFICIAL SEQUENCE
  Synthetic Construct
IKTH

SEQ ID NO: 1523 - protein, 4 aa, ARTIFICIAL SEQUENCE
  Synthetic Construct
IKTI

SEQ ID NO: 1524 - protein, 4 aa, ARTIFICIAL SEQUENCE
  Synthetic Construct
IKTL

SEQ ID NO: 1525 - protein, 4 aa, ARTIFICIAL SEQUENCE
  Synthetic Construct
IKTN

SEQ ID NO: 1526 - protein, 4 aa, ARTIFICIAL SEQUENCE
  Synthetic Construct
IKTQ

SEQ ID NO: 1527 - protein, 4 aa, ARTIFICIAL SEQUENCE
  Synthetic Construct
IKTR

SEQ ID NO: 1528 - protein, 4 aa, ARTIFICIAL SEQUENCE
  Synthetic Construct
IKTS

SEQ ID NO: 1529 - protein, 4 aa, ARTIFICIAL SEQUENCE
  Synthetic Construct
IKTT

SEQ ID NO: 1530 - protein, 4 aa, ARTIFICIAL SEQUENCE
  Synthetic Construct
IKTY

SEQ ID NO: 1531 - protein, 4 aa, ARTIFICIAL SEQUENCE
  Synthetic Construct
IKYA

SEQ ID NO: 1532 - protein, 4 aa, ARTIFICIAL SEQUENCE
  Synthetic Construct
IKYD

SEQ ID NO: 1533 - protein, 4 aa, ARTIFICIAL SEQUENCE
  Synthetic Construct
IKYE

SEQ ID NO: 1534 - protein, 4 aa, ARTIFICIAL SEQUENCE
  Synthetic Construct
IKYF

SEQ ID NO: 1535 - protein, 4 aa, ARTIFICIAL SEQUENCE
  Synthetic Construct
IKYG

SEQ ID NO: 1536 - protein, 4 aa, ARTIFICIAL SEQUENCE
  Synthetic Construct
IKYH

SEQ ID NO: 1537 - protein, 4 aa, ARTIFICIAL SEQUENCE
  Synthetic Construct
IKYI

SEQ ID NO: 1538 - protein, 4 aa, ARTIFICIAL SEQUENCE
  Synthetic Construct
IKYL

SEQ ID NO: 1539 - protein, 4 aa, ARTIFICIAL SEQUENCE
  Synthetic Construct
IKYN

SEQ ID NO: 1540 - protein, 4 aa, ARTIFICIAL SEQUENCE
  Synthetic Construct
IKYQ

SEQ ID NO: 1541 - protein, 4 aa, ARTIFICIAL SEQUENCE
  Synthetic Construct
IKYR

SEQ ID NO: 1542 - protein, 4 aa, ARTIFICIAL SEQUENCE
  Synthetic Construct
IKYS

SEQ ID NO: 1543 - protein, 4 aa, ARTIFICIAL SEQUENCE
  Synthetic Construct
IKYT

SEQ ID NO: 1544 - protein, 4 aa, ARTIFICIAL SEQUENCE
  Synthetic Construct
IKYY

SEQ ID NO: 1545 - protein, 4 aa, ARTIFICIAL SEQUENCE
  Synthetic Construct
LKAA

SEQ ID NO: 1546 - protein, 4 aa, ARTIFICIAL SEQUENCE
  Synthetic Construct
LKAD

SEQ ID NO: 1547 - protein, 4 aa, ARTIFICIAL SEQUENCE
  Synthetic Construct
LKAE

SEQ ID NO: 1548 - protein, 4 aa, ARTIFICIAL SEQUENCE
  Synthetic Construct
LKAF

SEQ ID NO: 1549 - protein, 4 aa, ARTIFICIAL SEQUENCE
  Synthetic Construct
LKAG

SEQ ID NO: 1550 - protein, 4 aa, ARTIFICIAL SEQUENCE
  Synthetic Construct
LKAH

SEQ ID NO: 1551 - protein, 4 aa, ARTIFICIAL SEQUENCE
  Synthetic Construct
LKAI

SEQ ID NO: 1552 - protein, 4 aa, ARTIFICIAL SEQUENCE
  Synthetic Construct
LKAL

SEQ ID NO: 1553 - protein, 4 aa, ARTIFICIAL SEQUENCE
  Synthetic Construct
LKAN

SEQ ID NO: 1554 - protein, 4 aa, ARTIFICIAL SEQUENCE
  Synthetic Construct
LKAQ

SEQ ID NO: 1555 - protein, 4 aa, ARTIFICIAL SEQUENCE
  Synthetic Construct
LKAR

SEQ ID NO: 1556 - protein, 4 aa, ARTIFICIAL SEQUENCE
  Synthetic Construct
LKAS

SEQ ID NO: 1557 - protein, 4 aa, ARTIFICIAL SEQUENCE
  Synthetic Construct
LKAT

SEQ ID NO: 1558 - protein, 4 aa, ARTIFICIAL SEQUENCE
  Synthetic Construct
LKAY

SEQ ID NO: 1559 - protein, 4 aa, ARTIFICIAL SEQUENCE
  Synthetic Construct
LKDA

SEQ ID NO: 1560 - protein, 4 aa, ARTIFICIAL SEQUENCE
  Synthetic Construct
LKDD

SEQ ID NO: 1561 - protein, 4 aa, ARTIFICIAL SEQUENCE
  Synthetic Construct
LKDE

SEQ ID NO: 1562 - protein, 4 aa, ARTIFICIAL SEQUENCE
  Synthetic Construct
LKDF

SEQ ID NO: 1563 - protein, 4 aa, ARTIFICIAL SEQUENCE
  Synthetic Construct
LKDG

SEQ ID NO: 1564 - protein, 4 aa, ARTIFICIAL SEQUENCE
  Synthetic Construct
LKDH

SEQ ID NO: 1565 - protein, 4 aa, ARTIFICIAL SEQUENCE
  Synthetic Construct
LKDI

SEQ ID NO: 1566 - protein, 4 aa, ARTIFICIAL SEQUENCE
  Synthetic Construct
LKDL

SEQ ID NO: 1567 - protein, 4 aa, ARTIFICIAL SEQUENCE
  Synthetic Construct
LKDN

SEQ ID NO: 1568 - protein, 4 aa, ARTIFICIAL SEQUENCE
  Synthetic Construct
LKDQ

SEQ ID NO: 1569 - protein, 4 aa, ARTIFICIAL SEQUENCE
  Synthetic Construct
LKDR

SEQ ID NO: 1570 - protein, 4 aa, ARTIFICIAL SEQUENCE
  Synthetic Construct
LKDS

SEQ ID NO: 1571 - protein, 4 aa, ARTIFICIAL SEQUENCE
  Synthetic Construct
LKDT

SEQ ID NO: 1572 - protein, 4 aa, ARTIFICIAL SEQUENCE
  Synthetic Construct
LKDY

SEQ ID NO: 1573 - protein, 4 aa, ARTIFICIAL SEQUENCE
  Synthetic Construct
LKEA

SEQ ID NO: 1574 - protein, 4 aa, ARTIFICIAL SEQUENCE
  Synthetic Construct
LKED

SEQ ID NO: 1575 - protein, 4 aa, ARTIFICIAL SEQUENCE
  Synthetic Construct
LKEE

SEQ ID NO: 1576 - protein, 4 aa, ARTIFICIAL SEQUENCE
  Synthetic Construct
LKEF

SEQ ID NO: 1577 - protein, 4 aa, ARTIFICIAL SEQUENCE
  Synthetic Construct
LKEG

SEQ ID NO: 1578 - protein, 4 aa, ARTIFICIAL SEQUENCE
  Synthetic Construct
LKEH

SEQ ID NO: 1579 - protein, 4 aa, ARTIFICIAL SEQUENCE
  Synthetic Construct
LKEI

SEQ ID NO: 1580 - protein, 4 aa, ARTIFICIAL SEQUENCE
  Synthetic Construct
LKEL

SEQ ID NO: 1581 - protein, 4 aa, ARTIFICIAL SEQUENCE
  Synthetic Construct
LKEN

SEQ ID NO: 1582 - protein, 4 aa, ARTIFICIAL SEQUENCE
  Synthetic Construct
LKEQ

SEQ ID NO: 1583 - protein, 4 aa, ARTIFICIAL SEQUENCE
  Synthetic Construct
LKER

SEQ ID NO: 1584 - protein, 4 aa, ARTIFICIAL SEQUENCE
  Synthetic Construct
LKES

SEQ ID NO: 1585 - protein, 4 aa, ARTIFICIAL SEQUENCE
  Synthetic Construct
LKET

SEQ ID NO: 1586 - protein, 4 aa, ARTIFICIAL SEQUENCE
  Synthetic Construct
LKEY

SEQ ID NO: 1587 - protein, 4 aa, ARTIFICIAL SEQUENCE
  Synthetic Construct
LKFA

SEQ ID NO: 1588 - protein, 4 aa, ARTIFICIAL SEQUENCE
  Synthetic Construct
LKFD

SEQ ID NO: 1589 - protein, 4 aa, ARTIFICIAL SEQUENCE
  Synthetic Construct
LKFE

SEQ ID NO: 1590 - protein, 4 aa, ARTIFICIAL SEQUENCE
  Synthetic Construct
LKFF

SEQ ID NO: 1591 - protein, 4 aa, ARTIFICIAL SEQUENCE
  Synthetic Construct
LKFG

SEQ ID NO: 1592 - protein, 4 aa, ARTIFICIAL SEQUENCE
  Synthetic Construct
LKFH

SEQ ID NO: 1593 - protein, 4 aa, ARTIFICIAL SEQUENCE
  Synthetic Construct
LKFI

SEQ ID NO: 1594 - protein, 4 aa, ARTIFICIAL SEQUENCE
  Synthetic Construct
LKFL

SEQ ID NO: 1595 - protein, 4 aa, ARTIFICIAL SEQUENCE
  Synthetic Construct
LKFN

SEQ ID NO: 1596 - protein, 4 aa, ARTIFICIAL SEQUENCE
  Synthetic Construct
LKFQ

SEQ ID NO: 1597 - protein, 4 aa, ARTIFICIAL SEQUENCE
  Synthetic Construct
LKFR

SEQ ID NO: 1598 - protein, 4 aa, ARTIFICIAL SEQUENCE
  Synthetic Construct
LKFS

SEQ ID NO: 1599 - protein, 4 aa, ARTIFICIAL SEQUENCE
  Synthetic Construct
LKFT

SEQ ID NO: 1600 - protein, 4 aa, ARTIFICIAL SEQUENCE
  Synthetic Construct
LKFY

SEQ ID NO: 1601 - protein, 4 aa, ARTIFICIAL SEQUENCE
  Synthetic Construct
LKGA

SEQ ID NO: 1602 - protein, 4 aa, ARTIFICIAL SEQUENCE
  Synthetic Construct
LKGD

SEQ ID NO: 1603 - protein, 4 aa, ARTIFICIAL SEQUENCE
  Synthetic Construct
LKGE

SEQ ID NO: 1604 - protein, 4 aa, ARTIFICIAL SEQUENCE
  Synthetic Construct
LKGF

SEQ ID NO: 1605 - protein, 4 aa, ARTIFICIAL SEQUENCE
  Synthetic Construct
LKGG

SEQ ID NO: 1606 - protein, 4 aa, ARTIFICIAL SEQUENCE
  Synthetic Construct
LKGH

SEQ ID NO: 1607 - protein, 4 aa, ARTIFICIAL SEQUENCE
  Synthetic Construct
LKGI

SEQ ID NO: 1608 - protein, 4 aa, ARTIFICIAL SEQUENCE
  Synthetic Construct
LKGL

SEQ ID NO: 1609 - protein, 4 aa, ARTIFICIAL SEQUENCE
  Synthetic Construct
LKGN

SEQ ID NO: 1610 - protein, 4 aa, ARTIFICIAL SEQUENCE
  Synthetic Construct
LKGQ

SEQ ID NO: 1611 - protein, 4 aa, ARTIFICIAL SEQUENCE
  Synthetic Construct
LKGR

SEQ ID NO: 1612 - protein, 4 aa, ARTIFICIAL SEQUENCE
  Synthetic Construct
LKGS

SEQ ID NO: 1613 - protein, 4 aa, ARTIFICIAL SEQUENCE
  Synthetic Construct
LKGT

SEQ ID NO: 1614 - protein, 4 aa, ARTIFICIAL SEQUENCE
  Synthetic Construct
LKGY

SEQ ID NO: 1615 - protein, 4 aa, ARTIFICIAL SEQUENCE
  Synthetic Construct
LKHA

SEQ ID NO: 1616 - protein, 4 aa, ARTIFICIAL SEQUENCE
  Synthetic Construct
LKHD

SEQ ID NO: 1617 - protein, 4 aa, ARTIFICIAL SEQUENCE
  Synthetic Construct
LKHE

SEQ ID NO: 1618 - protein, 4 aa, ARTIFICIAL SEQUENCE
  Synthetic Construct
LKHF

SEQ ID NO: 1619 - protein, 4 aa, ARTIFICIAL SEQUENCE
  Synthetic Construct
LKHG

SEQ ID NO: 1620 - protein, 4 aa, ARTIFICIAL SEQUENCE
  Synthetic Construct
LKHH

SEQ ID NO: 1621 - protein, 4 aa, ARTIFICIAL SEQUENCE
  Synthetic Construct
LKHI

SEQ ID NO: 1622 - protein, 4 aa, ARTIFICIAL SEQUENCE
  Synthetic Construct
LKHL

SEQ ID NO: 1623 - protein, 4 aa, ARTIFICIAL SEQUENCE
  Synthetic Construct
LKHN

SEQ ID NO: 1624 - protein, 4 aa, ARTIFICIAL SEQUENCE
  Synthetic Construct
LKHQ

SEQ ID NO: 1625 - protein, 4 aa, ARTIFICIAL SEQUENCE
  Synthetic Construct
LKHR

SEQ ID NO: 1626 - protein, 4 aa, ARTIFICIAL SEQUENCE
  Synthetic Construct
LKHS

SEQ ID NO: 1627 - protein, 4 aa, ARTIFICIAL SEQUENCE
  Synthetic Construct
LKHT

SEQ ID NO: 1628 - protein, 4 aa, ARTIFICIAL SEQUENCE
  Synthetic Construct
LKHY

SEQ ID NO: 1629 - protein, 4 aa, ARTIFICIAL SEQUENCE
  Synthetic Construct
LKIA

SEQ ID NO: 1630 - protein, 4 aa, ARTIFICIAL SEQUENCE
  Synthetic Construct
LKID

SEQ ID NO: 1631 - protein, 4 aa, ARTIFICIAL SEQUENCE
  Synthetic Construct
LKIE

SEQ ID NO: 1632 - protein, 4 aa, ARTIFICIAL SEQUENCE
  Synthetic Construct
LKIF

SEQ ID NO: 1633 - protein, 4 aa, ARTIFICIAL SEQUENCE
  Synthetic Construct
LKIG

SEQ ID NO: 1634 - protein, 4 aa, ARTIFICIAL SEQUENCE
  Synthetic Construct
LKIH

SEQ ID NO: 1635 - protein, 4 aa, ARTIFICIAL SEQUENCE
  Synthetic Construct
LKII

SEQ ID NO: 1636 - protein, 4 aa, ARTIFICIAL SEQUENCE
  Synthetic Construct
LKIL

SEQ ID NO: 1637 - protein, 4 aa, ARTIFICIAL SEQUENCE
  Synthetic Construct
LKIN

SEQ ID NO: 1638 - protein, 4 aa, ARTIFICIAL SEQUENCE
  Synthetic Construct
LKIQ

SEQ ID NO: 1639 - protein, 4 aa, ARTIFICIAL SEQUENCE
  Synthetic Construct
LKIR

SEQ ID NO: 1640 - protein, 4 aa, ARTIFICIAL SEQUENCE
  Synthetic Construct
LKIS

SEQ ID NO: 1641 - protein, 4 aa, ARTIFICIAL SEQUENCE
  Synthetic Construct
LKIT

SEQ ID NO: 1642 - protein, 4 aa, ARTIFICIAL SEQUENCE
  Synthetic Construct
LKIY

SEQ ID NO: 1643 - protein, 4 aa, ARTIFICIAL SEQUENCE
  Synthetic Construct
LKLA

SEQ ID NO: 1644 - protein, 4 aa, ARTIFICIAL SEQUENCE
  Synthetic Construct
LKLD

SEQ ID NO: 1645 - protein, 4 aa, ARTIFICIAL SEQUENCE
  Synthetic Construct
LKLE

SEQ ID NO: 1646 - protein, 4 aa, ARTIFICIAL SEQUENCE
  Synthetic Construct
LKLF

SEQ ID NO: 1647 - protein, 4 aa, ARTIFICIAL SEQUENCE
  Synthetic Construct
LKLG

SEQ ID NO: 1648 - protein, 4 aa, ARTIFICIAL SEQUENCE
  Synthetic Construct
LKLH

SEQ ID NO: 1649 - protein, 4 aa, ARTIFICIAL SEQUENCE
  Synthetic Construct
LKLI

SEQ ID NO: 1650 - protein, 4 aa, ARTIFICIAL SEQUENCE
  Synthetic Construct
LKLL

SEQ ID NO: 1651 - protein, 4 aa, ARTIFICIAL SEQUENCE
  Synthetic Construct
LKLN

SEQ ID NO: 1652 - protein, 4 aa, ARTIFICIAL SEQUENCE
  Synthetic Construct
LKLQ

SEQ ID NO: 1653 - protein, 4 aa, ARTIFICIAL SEQUENCE
  Synthetic Construct
LKLR

SEQ ID NO: 1654 - protein, 4 aa, ARTIFICIAL SEQUENCE
  Synthetic Construct
LKLS

SEQ ID NO: 1655 - protein, 4 aa, ARTIFICIAL SEQUENCE
  Synthetic Construct
LKLT

SEQ ID NO: 1656 - protein, 4 aa, ARTIFICIAL SEQUENCE
  Synthetic Construct
LKLY

SEQ ID NO: 1657 - protein, 4 aa, ARTIFICIAL SEQUENCE
  Synthetic Construct
LKNA

SEQ ID NO: 1658 - protein, 4 aa, ARTIFICIAL SEQUENCE
  Synthetic Construct
LKND

SEQ ID NO: 1659 - protein, 4 aa, ARTIFICIAL SEQUENCE
  Synthetic Construct
LKNE

SEQ ID NO: 1660 - protein, 4 aa, ARTIFICIAL SEQUENCE
  Synthetic Construct
LKNF

SEQ ID NO: 1661 - protein, 4 aa, ARTIFICIAL SEQUENCE
  Synthetic Construct
LKNG

SEQ ID NO: 1662 - protein, 4 aa, ARTIFICIAL SEQUENCE
  Synthetic Construct
LKNH

SEQ ID NO: 1663 - protein, 4 aa, ARTIFICIAL SEQUENCE
  Synthetic Construct
LKNI

SEQ ID NO: 1664 - protein, 4 aa, ARTIFICIAL SEQUENCE
  Synthetic Construct
LKNL

SEQ ID NO: 1665 - protein, 4 aa, ARTIFICIAL SEQUENCE
  Synthetic Construct
LKNN

SEQ ID NO: 1666 - protein, 4 aa, ARTIFICIAL SEQUENCE
  Synthetic Construct
LKNQ

SEQ ID NO: 1667 - protein, 4 aa, ARTIFICIAL SEQUENCE
  Synthetic Construct
LKNR

SEQ ID NO: 1668 - protein, 4 aa, ARTIFICIAL SEQUENCE
  Synthetic Construct
LKNS

SEQ ID NO: 1669 - protein, 4 aa, ARTIFICIAL SEQUENCE
  Synthetic Construct
LKNT

SEQ ID NO: 1670 - protein, 4 aa, ARTIFICIAL SEQUENCE
  Synthetic Construct
LKNY

SEQ ID NO: 1671 - protein, 4 aa, ARTIFICIAL SEQUENCE
  Synthetic Construct
LKPA

SEQ ID NO: 1672 - protein, 4 aa, ARTIFICIAL SEQUENCE
  Synthetic Construct
LKPD

SEQ ID NO: 1673 - protein, 4 aa, ARTIFICIAL SEQUENCE
  Synthetic Construct
LKPE

SEQ ID NO: 1674 - protein, 4 aa, ARTIFICIAL SEQUENCE
  Synthetic Construct
LKPF

SEQ ID NO: 1675 - protein, 4 aa, ARTIFICIAL SEQUENCE
  Synthetic Construct
LKPG

SEQ ID NO: 1676 - protein, 4 aa, ARTIFICIAL SEQUENCE
  Synthetic Construct
LKPH

SEQ ID NO: 1677 - protein, 4 aa, ARTIFICIAL SEQUENCE
  Synthetic Construct
LKPI

SEQ ID NO: 1678 - protein, 4 aa, ARTIFICIAL SEQUENCE
  Synthetic Construct
LKPL

SEQ ID NO: 1679 - protein, 4 aa, ARTIFICIAL SEQUENCE
  Synthetic Construct
LKPN

SEQ ID NO: 1680 - protein, 4 aa, ARTIFICIAL SEQUENCE
  Synthetic Construct
LKPQ

SEQ ID NO: 1681 - protein, 4 aa, ARTIFICIAL SEQUENCE
  Synthetic Construct
LKPR

SEQ ID NO: 1682 - protein, 4 aa, ARTIFICIAL SEQUENCE
  Synthetic Construct
LKPS

SEQ ID NO: 1683 - protein, 4 aa, ARTIFICIAL SEQUENCE
  Synthetic Construct
LKPT

SEQ ID NO: 1684 - protein, 4 aa, ARTIFICIAL SEQUENCE
  Synthetic Construct
LKPY

SEQ ID NO: 1685 - protein, 4 aa, ARTIFICIAL SEQUENCE
  Synthetic Construct
LKQA

SEQ ID NO: 1686 - protein, 4 aa, ARTIFICIAL SEQUENCE
  Synthetic Construct
LKQD

SEQ ID NO: 1687 - protein, 4 aa, ARTIFICIAL SEQUENCE
  Synthetic Construct
LKQE

SEQ ID NO: 1688 - protein, 4 aa, ARTIFICIAL SEQUENCE
  Synthetic Construct
LKQF

SEQ ID NO: 1689 - protein, 4 aa, ARTIFICIAL SEQUENCE
  Synthetic Construct
LKQG

SEQ ID NO: 1690 - protein, 4 aa, ARTIFICIAL SEQUENCE
  Synthetic Construct
LKQH

SEQ ID NO: 1691 - protein, 4 aa, ARTIFICIAL SEQUENCE
  Synthetic Construct
LKQI

SEQ ID NO: 1692 - protein, 4 aa, ARTIFICIAL SEQUENCE
  Synthetic Construct
LKQL

SEQ ID NO: 1693 - protein, 4 aa, ARTIFICIAL SEQUENCE
  Synthetic Construct
LKQN

SEQ ID NO: 1694 - protein, 4 aa, ARTIFICIAL SEQUENCE
  Synthetic Construct
LKQQ

SEQ ID NO: 1695 - protein, 4 aa, ARTIFICIAL SEQUENCE
  Synthetic Construct
LKQR

SEQ ID NO: 1696 - protein, 4 aa, ARTIFICIAL SEQUENCE
  Synthetic Construct
LKQS

SEQ ID NO: 1697 - protein, 4 aa, ARTIFICIAL SEQUENCE
  Synthetic Construct
LKQT

SEQ ID NO: 1698 - protein, 4 aa, ARTIFICIAL SEQUENCE
  Synthetic Construct
LKQY

SEQ ID NO: 1699 - protein, 4 aa, ARTIFICIAL SEQUENCE
  Synthetic Construct
LKRA

SEQ ID NO: 1700 - protein, 4 aa, ARTIFICIAL SEQUENCE
  Synthetic Construct
LKRD

SEQ ID NO: 1701 - protein, 4 aa, ARTIFICIAL SEQUENCE
  Synthetic Construct
LKRE

SEQ ID NO: 1702 - protein, 4 aa, ARTIFICIAL SEQUENCE
  Synthetic Construct
LKRF

SEQ ID NO: 1703 - protein, 4 aa, ARTIFICIAL SEQUENCE
  Synthetic Construct
LKRG

SEQ ID NO: 1704 - protein, 4 aa, ARTIFICIAL SEQUENCE
  Synthetic Construct
LKRH

SEQ ID NO: 1705 - protein, 4 aa, ARTIFICIAL SEQUENCE
  Synthetic Construct
LKRI

SEQ ID NO: 1706 - protein, 4 aa, ARTIFICIAL SEQUENCE
  Synthetic Construct
LKRL

SEQ ID NO: 1707 - protein, 4 aa, ARTIFICIAL SEQUENCE
  Synthetic Construct
LKRN

SEQ ID NO: 1708 - protein, 4 aa, ARTIFICIAL SEQUENCE
  Synthetic Construct
LKRQ

SEQ ID NO: 1709 - protein, 4 aa, ARTIFICIAL SEQUENCE
  Synthetic Construct
LKRR

SEQ ID NO: 1710 - protein, 4 aa, ARTIFICIAL SEQUENCE
  Synthetic Construct
LKRS

SEQ ID NO: 1711 - protein, 4 aa, ARTIFICIAL SEQUENCE
  Synthetic Construct
LKRT

SEQ ID NO: 1712 - protein, 4 aa, ARTIFICIAL SEQUENCE
  Synthetic Construct
LKRY

SEQ ID NO: 1713 - protein, 4 aa, ARTIFICIAL SEQUENCE
  Synthetic Construct
LKSA

SEQ ID NO: 1714 - protein, 4 aa, ARTIFICIAL SEQUENCE
  Synthetic Construct
LKSD

SEQ ID NO: 1715 - protein, 4 aa, ARTIFICIAL SEQUENCE
  Synthetic Construct
LKSE

SEQ ID NO: 1716 - protein, 4 aa, ARTIFICIAL SEQUENCE
  Synthetic Construct
LKSF

SEQ ID NO: 1717 - protein, 4 aa, ARTIFICIAL SEQUENCE
  Synthetic Construct
LKSG

SEQ ID NO: 1718 - protein, 4 aa, ARTIFICIAL SEQUENCE
  Synthetic Construct
LKSH

SEQ ID NO: 1719 - protein, 4 aa, ARTIFICIAL SEQUENCE
  Synthetic Construct
LKSI

SEQ ID NO: 1720 - protein, 4 aa, ARTIFICIAL SEQUENCE
  Synthetic Construct
LKSL

SEQ ID NO: 1721 - protein, 4 aa, ARTIFICIAL SEQUENCE
  Synthetic Construct
LKSN

SEQ ID NO: 1722 - protein, 4 aa, ARTIFICIAL SEQUENCE
  Synthetic Construct
LKSQ

SEQ ID NO: 1723 - protein, 4 aa, ARTIFICIAL SEQUENCE
  Synthetic Construct
LKSR

SEQ ID NO: 1724 - protein, 4 aa, ARTIFICIAL SEQUENCE
  Synthetic Construct
LKSS

SEQ ID NO: 1725 - protein, 4 aa, ARTIFICIAL SEQUENCE
  Synthetic Construct
LKST

SEQ ID NO: 1726 - protein, 4 aa, ARTIFICIAL SEQUENCE
  Synthetic Construct
LKSY

SEQ ID NO: 1727 - protein, 4 aa, ARTIFICIAL SEQUENCE
  Synthetic Construct
LKTA

SEQ ID NO: 1728 - protein, 4 aa, ARTIFICIAL SEQUENCE
  Synthetic Construct
LKTD

SEQ ID NO: 1729 - protein, 4 aa, ARTIFICIAL SEQUENCE
  Synthetic Construct
LKTE

SEQ ID NO: 1730 - protein, 4 aa, ARTIFICIAL SEQUENCE
  Synthetic Construct
LKTF

SEQ ID NO: 1731 - protein, 4 aa, ARTIFICIAL SEQUENCE
  Synthetic Construct
LKTG

SEQ ID NO: 1732 - protein, 4 aa, ARTIFICIAL SEQUENCE
  Synthetic Construct
LKTH

SEQ ID NO: 1733 - protein, 4 aa, ARTIFICIAL SEQUENCE
  Synthetic Construct
LKTI

SEQ ID NO: 1734 - protein, 4 aa, ARTIFICIAL SEQUENCE
  Synthetic Construct
LKTL

SEQ ID NO: 1735 - protein, 4 aa, ARTIFICIAL SEQUENCE
  Synthetic Construct
LKTN

SEQ ID NO: 1736 - protein, 4 aa, ARTIFICIAL SEQUENCE
  Synthetic Construct
LKTQ

SEQ ID NO: 1737 - protein, 4 aa, ARTIFICIAL SEQUENCE
  Synthetic Construct
LKTR

SEQ ID NO: 1738 - protein, 4 aa, ARTIFICIAL SEQUENCE
  Synthetic Construct
LKTS

SEQ ID NO: 1739 - protein, 4 aa, ARTIFICIAL SEQUENCE
  Synthetic Construct
LKTT

SEQ ID NO: 1740 - protein, 4 aa, ARTIFICIAL SEQUENCE
  Synthetic Construct
LKTY

SEQ ID NO: 1741 - protein, 4 aa, ARTIFICIAL SEQUENCE
  Synthetic Construct
LKYA

SEQ ID NO: 1742 - protein, 4 aa, ARTIFICIAL SEQUENCE
  Synthetic Construct
LKYD

SEQ ID NO: 1743 - protein, 4 aa, ARTIFICIAL SEQUENCE
  Synthetic Construct
LKYE

SEQ ID NO: 1744 - protein, 4 aa, ARTIFICIAL SEQUENCE
  Synthetic Construct
LKYF

SEQ ID NO: 1745 - protein, 4 aa, ARTIFICIAL SEQUENCE
  Synthetic Construct
LKYG

SEQ ID NO: 1746 - protein, 4 aa, ARTIFICIAL SEQUENCE
  Synthetic Construct
LKYH

SEQ ID NO: 1747 - protein, 4 aa, ARTIFICIAL SEQUENCE
  Synthetic Construct
LKYI

SEQ ID NO: 1748 - protein, 4 aa, ARTIFICIAL SEQUENCE
  Synthetic Construct
LKYL

SEQ ID NO: 1749 - protein, 4 aa, ARTIFICIAL SEQUENCE
  Synthetic Construct
LKYN

SEQ ID NO: 1750 - protein, 4 aa, ARTIFICIAL SEQUENCE
  Synthetic Construct
LKYQ

SEQ ID NO: 1751 - protein, 4 aa, ARTIFICIAL SEQUENCE
  Synthetic Construct
LKYR

SEQ ID NO: 1752 - protein, 4 aa, ARTIFICIAL SEQUENCE
  Synthetic Construct
LKYS

SEQ ID NO: 1753 - protein, 4 aa, ARTIFICIAL SEQUENCE
  Synthetic Construct
LKYT

SEQ ID NO: 1754 - protein, 4 aa, ARTIFICIAL SEQUENCE
  Synthetic Construct
LKYY

SEQ ID NO: 1755 - protein, 4 aa, ARTIFICIAL SEQUENCE
  Synthetic Construct
NKAA

SEQ ID NO: 1756 - protein, 4 aa, ARTIFICIAL SEQUENCE
  Synthetic Construct
NKAD

SEQ ID NO: 1757 - protein, 4 aa, ARTIFICIAL SEQUENCE
  Synthetic Construct
NKAE

SEQ ID NO: 1758 - protein, 4 aa, ARTIFICIAL SEQUENCE
  Synthetic Construct
NKAF

SEQ ID NO: 1759 - protein, 4 aa, ARTIFICIAL SEQUENCE
  Synthetic Construct
NKAG

SEQ ID NO: 1760 - protein, 4 aa, ARTIFICIAL SEQUENCE
  Synthetic Construct
NKAH

SEQ ID NO: 1761 - protein, 4 aa, ARTIFICIAL SEQUENCE
  Synthetic Construct
NKAI

SEQ ID NO: 1762 - protein, 4 aa, ARTIFICIAL SEQUENCE
  Synthetic Construct
NKAL

SEQ ID NO: 1763 - protein, 4 aa, ARTIFICIAL SEQUENCE
  Synthetic Construct
NKAN

SEQ ID NO: 1764 - protein, 4 aa, ARTIFICIAL SEQUENCE
  Synthetic Construct
NKAQ

SEQ ID NO: 1765 - protein, 4 aa, ARTIFICIAL SEQUENCE
  Synthetic Construct
NKAR

SEQ ID NO: 1766 - protein, 4 aa, ARTIFICIAL SEQUENCE
  Synthetic Construct
NKAS

SEQ ID NO: 1767 - protein, 4 aa, ARTIFICIAL SEQUENCE
  Synthetic Construct
NKAT

SEQ ID NO: 1768 - protein, 4 aa, ARTIFICIAL SEQUENCE
  Synthetic Construct
NKAY

SEQ ID NO: 1769 - protein, 4 aa, ARTIFICIAL SEQUENCE
  Synthetic Construct
NKDA

SEQ ID NO: 1770 - protein, 4 aa, ARTIFICIAL SEQUENCE
  Synthetic Construct
NKDD

SEQ ID NO: 1771 - protein, 4 aa, ARTIFICIAL SEQUENCE
  Synthetic Construct
NKDE

SEQ ID NO: 1772 - protein, 4 aa, ARTIFICIAL SEQUENCE
  Synthetic Construct
NKDF

SEQ ID NO: 1773 - protein, 4 aa, ARTIFICIAL SEQUENCE
  Synthetic Construct
NKDG

SEQ ID NO: 1774 - protein, 4 aa, ARTIFICIAL SEQUENCE
  Synthetic Construct
NKDH

SEQ ID NO: 1775 - protein, 4 aa, ARTIFICIAL SEQUENCE
  Synthetic Construct
NKDI

SEQ ID NO: 1776 - protein, 4 aa, ARTIFICIAL SEQUENCE
  Synthetic Construct
NKDL

SEQ ID NO: 1777 - protein, 4 aa, ARTIFICIAL SEQUENCE
  Synthetic Construct
NKDN

SEQ ID NO: 1778 - protein, 4 aa, ARTIFICIAL SEQUENCE
  Synthetic Construct
NKDQ

SEQ ID NO: 1779 - protein, 4 aa, ARTIFICIAL SEQUENCE
  Synthetic Construct
NKDR

SEQ ID NO: 1780 - protein, 4 aa, ARTIFICIAL SEQUENCE
  Synthetic Construct
NKDS

SEQ ID NO: 1781 - protein, 4 aa, ARTIFICIAL SEQUENCE
  Synthetic Construct
NKDT

SEQ ID NO: 1782 - protein, 4 aa, ARTIFICIAL SEQUENCE
  Synthetic Construct
NKDY

SEQ ID NO: 1783 - protein, 4 aa, ARTIFICIAL SEQUENCE
  Synthetic Construct
NKEA

SEQ ID NO: 1784 - protein, 4 aa, ARTIFICIAL SEQUENCE
  Synthetic Construct
NKED

SEQ ID NO: 1785 - protein, 4 aa, ARTIFICIAL SEQUENCE
  Synthetic Construct
NKEE

SEQ ID NO: 1786 - protein, 4 aa, ARTIFICIAL SEQUENCE
  Synthetic Construct
NKEF

SEQ ID NO: 1787 - protein, 4 aa, ARTIFICIAL SEQUENCE
  Synthetic Construct
NKEG

SEQ ID NO: 1788 - protein, 4 aa, ARTIFICIAL SEQUENCE
  Synthetic Construct
NKEH

SEQ ID NO: 1789 - protein, 4 aa, ARTIFICIAL SEQUENCE
  Synthetic Construct
NKEI

SEQ ID NO: 1790 - protein, 4 aa, ARTIFICIAL SEQUENCE
  Synthetic Construct
NKEL

SEQ ID NO: 1791 - protein, 4 aa, ARTIFICIAL SEQUENCE
  Synthetic Construct
NKEN

SEQ ID NO: 1792 - protein, 4 aa, ARTIFICIAL SEQUENCE
  Synthetic Construct
NKEQ

SEQ ID NO: 1793 - protein, 4 aa, ARTIFICIAL SEQUENCE
  Synthetic Construct
NKER

SEQ ID NO: 1794 - protein, 4 aa, ARTIFICIAL SEQUENCE
  Synthetic Construct
NKES

SEQ ID NO: 1795 - protein, 4 aa, ARTIFICIAL SEQUENCE
  Synthetic Construct
NKET

SEQ ID NO: 1796 - protein, 4 aa, ARTIFICIAL SEQUENCE
  Synthetic Construct
NKEY

SEQ ID NO: 1797 - protein, 4 aa, ARTIFICIAL SEQUENCE
  Synthetic Construct
NKFA

SEQ ID NO: 1798 - protein, 4 aa, ARTIFICIAL SEQUENCE
  Synthetic Construct
NKFD

SEQ ID NO: 1799 - protein, 4 aa, ARTIFICIAL SEQUENCE
  Synthetic Construct
NKFE

SEQ ID NO: 1800 - protein, 4 aa, ARTIFICIAL SEQUENCE
  Synthetic Construct
NKFF

SEQ ID NO: 1801 - protein, 4 aa, ARTIFICIAL SEQUENCE
  Synthetic Construct
NKFG

SEQ ID NO: 1802 - protein, 4 aa, ARTIFICIAL SEQUENCE
  Synthetic Construct
NKFH

SEQ ID NO: 1803 - protein, 4 aa, ARTIFICIAL SEQUENCE
  Synthetic Construct
NKFI

SEQ ID NO: 1804 - protein, 4 aa, ARTIFICIAL SEQUENCE
  Synthetic Construct
NKFL

SEQ ID NO: 1805 - protein, 4 aa, ARTIFICIAL SEQUENCE
  Synthetic Construct
NKFN

SEQ ID NO: 1806 - protein, 4 aa, ARTIFICIAL SEQUENCE
  Synthetic Construct
NKFQ

SEQ ID NO: 1807 - protein, 4 aa, ARTIFICIAL SEQUENCE
  Synthetic Construct
NKFR

SEQ ID NO: 1808 - protein, 4 aa, ARTIFICIAL SEQUENCE
  Synthetic Construct
NKFS

SEQ ID NO: 1809 - protein, 4 aa, ARTIFICIAL SEQUENCE
  Synthetic Construct
NKFT

SEQ ID NO: 1810 - protein, 4 aa, ARTIFICIAL SEQUENCE
  Synthetic Construct
NKFY

SEQ ID NO: 1811 - protein, 4 aa, ARTIFICIAL SEQUENCE
  Synthetic Construct
NKGA

SEQ ID NO: 1812 - protein, 4 aa, ARTIFICIAL SEQUENCE
  Synthetic Construct
NKGD

SEQ ID NO: 1813 - protein, 4 aa, ARTIFICIAL SEQUENCE
  Synthetic Construct
NKGE

SEQ ID NO: 1814 - protein, 4 aa, ARTIFICIAL SEQUENCE
  Synthetic Construct
NKGF

SEQ ID NO: 1815 - protein, 4 aa, ARTIFICIAL SEQUENCE
  Synthetic Construct
NKGG

SEQ ID NO: 1816 - protein, 4 aa, ARTIFICIAL SEQUENCE
  Synthetic Construct
NKGH

SEQ ID NO: 1817 - protein, 4 aa, ARTIFICIAL SEQUENCE
  Synthetic Construct
NKGI

SEQ ID NO: 1818 - protein, 4 aa, ARTIFICIAL SEQUENCE
  Synthetic Construct
NKGL

SEQ ID NO: 1819 - protein, 4 aa, ARTIFICIAL SEQUENCE
  Synthetic Construct
NKGN

SEQ ID NO: 1820 - protein, 4 aa, ARTIFICIAL SEQUENCE
  Synthetic Construct
NKGQ

SEQ ID NO: 1821 - protein, 4 aa, ARTIFICIAL SEQUENCE
  Synthetic Construct
NKGR

SEQ ID NO: 1822 - protein, 4 aa, ARTIFICIAL SEQUENCE
  Synthetic Construct
NKGS

SEQ ID NO: 1823 - protein, 4 aa, ARTIFICIAL SEQUENCE
  Synthetic Construct
NKGT

SEQ ID NO: 1824 - protein, 4 aa, ARTIFICIAL SEQUENCE
  Synthetic Construct
NKGY

SEQ ID NO: 1825 - protein, 4 aa, ARTIFICIAL SEQUENCE
  Synthetic Construct
NKHA

SEQ ID NO: 1826 - protein, 4 aa, ARTIFICIAL SEQUENCE
  Synthetic Construct
NKHD

SEQ ID NO: 1827 - protein, 4 aa, ARTIFICIAL SEQUENCE
  Synthetic Construct
NKHE

SEQ ID NO: 1828 - protein, 4 aa, ARTIFICIAL SEQUENCE
  Synthetic Construct
NKHF

SEQ ID NO: 1829 - protein, 4 aa, ARTIFICIAL SEQUENCE
  Synthetic Construct
NKHG

SEQ ID NO: 1830 - protein, 4 aa, ARTIFICIAL SEQUENCE
  Synthetic Construct
NKHH

SEQ ID NO: 1831 - protein, 4 aa, ARTIFICIAL SEQUENCE
  Synthetic Construct
NKHI

SEQ ID NO: 1832 - protein, 4 aa, ARTIFICIAL SEQUENCE
  Synthetic Construct
NKHL

SEQ ID NO: 1833 - protein, 4 aa, ARTIFICIAL SEQUENCE
  Synthetic Construct
NKHN

SEQ ID NO: 1834 - protein, 4 aa, ARTIFICIAL SEQUENCE
  Synthetic Construct
NKHQ

SEQ ID NO: 1835 - protein, 4 aa, ARTIFICIAL SEQUENCE
  Synthetic Construct
NKHR

SEQ ID NO: 1836 - protein, 4 aa, ARTIFICIAL SEQUENCE
  Synthetic Construct
NKHS

SEQ ID NO: 1837 - protein, 4 aa, ARTIFICIAL SEQUENCE
  Synthetic Construct
NKHT

SEQ ID NO: 1838 - protein, 4 aa, ARTIFICIAL SEQUENCE
  Synthetic Construct
NKHY

SEQ ID NO: 1839 - protein, 4 aa, ARTIFICIAL SEQUENCE
  Synthetic Construct
NKIA

SEQ ID NO: 1840 - protein, 4 aa, ARTIFICIAL SEQUENCE
  Synthetic Construct
NKID

SEQ ID NO: 1841 - protein, 4 aa, ARTIFICIAL SEQUENCE
  Synthetic Construct
NKIE

SEQ ID NO: 1842 - protein, 4 aa, ARTIFICIAL SEQUENCE
  Synthetic Construct
NKIF

SEQ ID NO: 1843 - protein, 4 aa, ARTIFICIAL SEQUENCE
  Synthetic Construct
NKIG

SEQ ID NO: 1844 - protein, 4 aa, ARTIFICIAL SEQUENCE
  Synthetic Construct
NKIH

SEQ ID NO: 1845 - protein, 4 aa, ARTIFICIAL SEQUENCE
  Synthetic Construct
NKII

SEQ ID NO: 1846 - protein, 4 aa, ARTIFICIAL SEQUENCE
  Synthetic Construct
NKIL

SEQ ID NO: 1847 - protein, 4 aa, ARTIFICIAL SEQUENCE
  Synthetic Construct
NKIN

SEQ ID NO: 1848 - protein, 4 aa, ARTIFICIAL SEQUENCE
  Synthetic Construct
NKIQ

SEQ ID NO: 1849 - protein, 4 aa, ARTIFICIAL SEQUENCE
  Synthetic Construct
NKIR

SEQ ID NO: 1850 - protein, 4 aa, ARTIFICIAL SEQUENCE
  Synthetic Construct
NKIS

SEQ ID NO: 1851 - protein, 4 aa, ARTIFICIAL SEQUENCE
  Synthetic Construct
NKIT

SEQ ID NO: 1852 - protein, 4 aa, ARTIFICIAL SEQUENCE
  Synthetic Construct
NKIY

SEQ ID NO: 1853 - protein, 4 aa, ARTIFICIAL SEQUENCE
  Synthetic Construct
NKLA

SEQ ID NO: 1854 - protein, 4 aa, ARTIFICIAL SEQUENCE
  Synthetic Construct
NKLD

SEQ ID NO: 1855 - protein, 4 aa, ARTIFICIAL SEQUENCE
  Synthetic Construct
NKLE

SEQ ID NO: 1856 - protein, 4 aa, ARTIFICIAL SEQUENCE
  Synthetic Construct
NKLF

SEQ ID NO: 1857 - protein, 4 aa, ARTIFICIAL SEQUENCE
  Synthetic Construct
NKLG

SEQ ID NO: 1858 - protein, 4 aa, ARTIFICIAL SEQUENCE
  Synthetic Construct
NKLH

SEQ ID NO: 1859 - protein, 4 aa, ARTIFICIAL SEQUENCE
  Synthetic Construct
NKLI

SEQ ID NO: 1860 - protein, 4 aa, ARTIFICIAL SEQUENCE
  Synthetic Construct
NKLL

SEQ ID NO: 1861 - protein, 4 aa, ARTIFICIAL SEQUENCE
  Synthetic Construct
NKLN

SEQ ID NO: 1862 - protein, 4 aa, ARTIFICIAL SEQUENCE
  Synthetic Construct
NKLQ

SEQ ID NO: 1863 - protein, 4 aa, ARTIFICIAL SEQUENCE
  Synthetic Construct
NKLR

SEQ ID NO: 1864 - protein, 4 aa, ARTIFICIAL SEQUENCE
  Synthetic Construct
NKLS

SEQ ID NO: 1865 - protein, 4 aa, ARTIFICIAL SEQUENCE
  Synthetic Construct
NKLT

SEQ ID NO: 1866 - protein, 4 aa, ARTIFICIAL SEQUENCE
  Synthetic Construct
NKLY

SEQ ID NO: 1867 - protein, 4 aa, ARTIFICIAL SEQUENCE
  Synthetic Construct
NKNA

SEQ ID NO: 1868 - protein, 4 aa, ARTIFICIAL SEQUENCE
  Synthetic Construct
NKND

SEQ ID NO: 1869 - protein, 4 aa, ARTIFICIAL SEQUENCE
  Synthetic Construct
NKNE

SEQ ID NO: 1870 - protein, 4 aa, ARTIFICIAL SEQUENCE
  Synthetic Construct
NKNF

SEQ ID NO: 1871 - protein, 4 aa, ARTIFICIAL SEQUENCE
  Synthetic Construct
NKNG

SEQ ID NO: 1872 - protein, 4 aa, ARTIFICIAL SEQUENCE
  Synthetic Construct
NKNH

SEQ ID NO: 1873 - protein, 4 aa, ARTIFICIAL SEQUENCE
  Synthetic Construct
NKNI

SEQ ID NO: 1874 - protein, 4 aa, ARTIFICIAL SEQUENCE
  Synthetic Construct
NKNL

SEQ ID NO: 1875 - protein, 4 aa, ARTIFICIAL SEQUENCE
  Synthetic Construct
NKNN

SEQ ID NO: 1876 - protein, 4 aa, ARTIFICIAL SEQUENCE
  Synthetic Construct
NKNQ

SEQ ID NO: 1877 - protein, 4 aa, ARTIFICIAL SEQUENCE
  Synthetic Construct
NKNR

SEQ ID NO: 1878 - protein, 4 aa, ARTIFICIAL SEQUENCE
  Synthetic Construct
NKNS

SEQ ID NO: 1879 - protein, 4 aa, ARTIFICIAL SEQUENCE
  Synthetic Construct
NKNT

SEQ ID NO: 1880 - protein, 4 aa, ARTIFICIAL SEQUENCE
  Synthetic Construct
NKNY

SEQ ID NO: 1881 - protein, 4 aa, ARTIFICIAL SEQUENCE
  Synthetic Construct
NKPA

SEQ ID NO: 1882 - protein, 4 aa, ARTIFICIAL SEQUENCE
  Synthetic Construct
NKPD

SEQ ID NO: 1883 - protein, 4 aa, ARTIFICIAL SEQUENCE
  Synthetic Construct
NKPE

SEQ ID NO: 1884 - protein, 4 aa, ARTIFICIAL SEQUENCE
  Synthetic Construct
NKPF

SEQ ID NO: 1885 - protein, 4 aa, ARTIFICIAL SEQUENCE
  Synthetic Construct
NKPG

SEQ ID NO: 1886 - protein, 4 aa, ARTIFICIAL SEQUENCE
  Synthetic Construct
NKPH

SEQ ID NO: 1887 - protein, 4 aa, ARTIFICIAL SEQUENCE
  Synthetic Construct
NKPI

SEQ ID NO: 1888 - protein, 4 aa, ARTIFICIAL SEQUENCE
  Synthetic Construct
NKPL

SEQ ID NO: 1889 - protein, 4 aa, ARTIFICIAL SEQUENCE
  Synthetic Construct
NKPN

SEQ ID NO: 1890 - protein, 4 aa, ARTIFICIAL SEQUENCE
  Synthetic Construct
NKPQ

SEQ ID NO: 1891 - protein, 4 aa, ARTIFICIAL SEQUENCE
  Synthetic Construct
NKPR

SEQ ID NO: 1892 - protein, 4 aa, ARTIFICIAL SEQUENCE
  Synthetic Construct
NKPS

SEQ ID NO: 1893 - protein, 4 aa, ARTIFICIAL SEQUENCE
  Synthetic Construct
NKPT

SEQ ID NO: 1894 - protein, 4 aa, ARTIFICIAL SEQUENCE
  Synthetic Construct
NKPY

SEQ ID NO: 1895 - protein, 4 aa, ARTIFICIAL SEQUENCE
  Synthetic Construct
NKQA

SEQ ID NO: 1896 - protein, 4 aa, ARTIFICIAL SEQUENCE
  Synthetic Construct
NKQD

SEQ ID NO: 1897 - protein, 4 aa, ARTIFICIAL SEQUENCE
  Synthetic Construct
NKQE

SEQ ID NO: 1898 - protein, 4 aa, ARTIFICIAL SEQUENCE
  Synthetic Construct
NKQF

SEQ ID NO: 1899 - protein, 4 aa, ARTIFICIAL SEQUENCE
  Synthetic Construct
NKQG

SEQ ID NO: 1900 - protein, 4 aa, ARTIFICIAL SEQUENCE
  Synthetic Construct
NKQH

SEQ ID NO: 1901 - protein, 4 aa, ARTIFICIAL SEQUENCE
  Synthetic Construct
NKQI

SEQ ID NO: 1902 - protein, 4 aa, ARTIFICIAL SEQUENCE
  Synthetic Construct
NKQL

SEQ ID NO: 1903 - protein, 4 aa, ARTIFICIAL SEQUENCE
  Synthetic Construct
NKQN

SEQ ID NO: 1904 - protein, 4 aa, ARTIFICIAL SEQUENCE
  Synthetic Construct
NKQQ

SEQ ID NO: 1905 - protein, 4 aa, ARTIFICIAL SEQUENCE
  Synthetic Construct
NKQR

SEQ ID NO: 1906 - protein, 4 aa, ARTIFICIAL SEQUENCE
  Synthetic Construct
NKQS

SEQ ID NO: 1907 - protein, 4 aa, ARTIFICIAL SEQUENCE
  Synthetic Construct
NKQT

SEQ ID NO: 1908 - protein, 4 aa, ARTIFICIAL SEQUENCE
  Synthetic Construct
NKQY

SEQ ID NO: 1909 - protein, 4 aa, ARTIFICIAL SEQUENCE
  Synthetic Construct
NKRA

SEQ ID NO: 1910 - protein, 4 aa, ARTIFICIAL SEQUENCE
  Synthetic Construct
NKRD

SEQ ID NO: 1911 - protein, 4 aa, ARTIFICIAL SEQUENCE
  Synthetic Construct
NKRE

SEQ ID NO: 1912 - protein, 4 aa, ARTIFICIAL SEQUENCE
  Synthetic Construct
NKRF

SEQ ID NO: 1913 - protein, 4 aa, ARTIFICIAL SEQUENCE
  Synthetic Construct
NKRG

SEQ ID NO: 1914 - protein, 4 aa, ARTIFICIAL SEQUENCE
  Synthetic Construct
NKRH

SEQ ID NO: 1915 - protein, 4 aa, ARTIFICIAL SEQUENCE
  Synthetic Construct
NKRI

SEQ ID NO: 1916 - protein, 4 aa, ARTIFICIAL SEQUENCE
  Synthetic Construct
NKRL

SEQ ID NO: 1917 - protein, 4 aa, ARTIFICIAL SEQUENCE
  Synthetic Construct
NKRN

SEQ ID NO: 1918 - protein, 4 aa, ARTIFICIAL SEQUENCE
  Synthetic Construct
NKRQ

SEQ ID NO: 1919 - protein, 4 aa, ARTIFICIAL SEQUENCE
  Synthetic Construct
NKRR

SEQ ID NO: 1920 - protein, 4 aa, ARTIFICIAL SEQUENCE
  Synthetic Construct
NKRS

SEQ ID NO: 1921 - protein, 4 aa, ARTIFICIAL SEQUENCE
  Synthetic Construct
NKRT

SEQ ID NO: 1922 - protein, 4 aa, ARTIFICIAL SEQUENCE
  Synthetic Construct
NKRY

SEQ ID NO: 1923 - protein, 4 aa, ARTIFICIAL SEQUENCE
  Synthetic Construct
NKSA

SEQ ID NO: 1924 - protein, 4 aa, ARTIFICIAL SEQUENCE
  Synthetic Construct
NKSD

SEQ ID NO: 1925 - protein, 4 aa, ARTIFICIAL SEQUENCE
  Synthetic Construct
NKSE

SEQ ID NO: 1926 - protein, 4 aa, ARTIFICIAL SEQUENCE
  Synthetic Construct
NKSF

SEQ ID NO: 1927 - protein, 4 aa, ARTIFICIAL SEQUENCE
  Synthetic Construct
NKSG

SEQ ID NO: 1928 - protein, 4 aa, ARTIFICIAL SEQUENCE
  Synthetic Construct
NKSH

SEQ ID NO: 1929 - protein, 4 aa, ARTIFICIAL SEQUENCE
  Synthetic Construct
NKSI

SEQ ID NO: 1930 - protein, 4 aa, ARTIFICIAL SEQUENCE
  Synthetic Construct
NKSL

SEQ ID NO: 1931 - protein, 4 aa, ARTIFICIAL SEQUENCE
  Synthetic Construct
NKSN

SEQ ID NO: 1932 - protein, 4 aa, ARTIFICIAL SEQUENCE
  Synthetic Construct
NKSQ

SEQ ID NO: 1933 - protein, 4 aa, ARTIFICIAL SEQUENCE
  Synthetic Construct
NKSR

SEQ ID NO: 1934 - protein, 4 aa, ARTIFICIAL SEQUENCE
  Synthetic Construct
NKSS

SEQ ID NO: 1935 - protein, 4 aa, ARTIFICIAL SEQUENCE
  Synthetic Construct
NKST

SEQ ID NO: 1936 - protein, 4 aa, ARTIFICIAL SEQUENCE
  Synthetic Construct
NKSY

SEQ ID NO: 1937 - protein, 4 aa, ARTIFICIAL SEQUENCE
  Synthetic Construct
NKTA

SEQ ID NO: 1938 - protein, 4 aa, ARTIFICIAL SEQUENCE
  Synthetic Construct
NKTD

SEQ ID NO: 1939 - protein, 4 aa, ARTIFICIAL SEQUENCE
  Synthetic Construct
NKTE

SEQ ID NO: 1940 - protein, 4 aa, ARTIFICIAL SEQUENCE
  Synthetic Construct
NKTF

SEQ ID NO: 1941 - protein, 4 aa, ARTIFICIAL SEQUENCE
  Synthetic Construct
NKTG

SEQ ID NO: 1942 - protein, 4 aa, ARTIFICIAL SEQUENCE
  Synthetic Construct
NKTH

SEQ ID NO: 1943 - protein, 4 aa, ARTIFICIAL SEQUENCE
  Synthetic Construct
NKTI

SEQ ID NO: 1944 - protein, 4 aa, ARTIFICIAL SEQUENCE
  Synthetic Construct
NKTL

SEQ ID NO: 1945 - protein, 4 aa, ARTIFICIAL SEQUENCE
  Synthetic Construct
NKTN

SEQ ID NO: 1946 - protein, 4 aa, ARTIFICIAL SEQUENCE
  Synthetic Construct
NKTQ

SEQ ID NO: 1947 - protein, 4 aa, ARTIFICIAL SEQUENCE
  Synthetic Construct
NKTR

SEQ ID NO: 1948 - protein, 4 aa, ARTIFICIAL SEQUENCE
  Synthetic Construct
NKTS

SEQ ID NO: 1949 - protein, 4 aa, ARTIFICIAL SEQUENCE
  Synthetic Construct
NKTT

SEQ ID NO: 1950 - protein, 4 aa, ARTIFICIAL SEQUENCE
  Synthetic Construct
NKTY

SEQ ID NO: 1951 - protein, 4 aa, ARTIFICIAL SEQUENCE
  Synthetic Construct
NKYA

SEQ ID NO: 1952 - protein, 4 aa, ARTIFICIAL SEQUENCE
  Synthetic Construct
NKYD

SEQ ID NO: 1953 - protein, 4 aa, ARTIFICIAL SEQUENCE
  Synthetic Construct
NKYE

SEQ ID NO: 1954 - protein, 4 aa, ARTIFICIAL SEQUENCE
  Synthetic Construct
NKYF

SEQ ID NO: 1955 - protein, 4 aa, ARTIFICIAL SEQUENCE
  Synthetic Construct
NKYG

SEQ ID NO: 1956 - protein, 4 aa, ARTIFICIAL SEQUENCE
  Synthetic Construct
NKYH

SEQ ID NO: 1957 - protein, 4 aa, ARTIFICIAL SEQUENCE
  Synthetic Construct
NKYI

SEQ ID NO: 1958 - protein, 4 aa, ARTIFICIAL SEQUENCE
  Synthetic Construct
NKYL

SEQ ID NO: 1959 - protein, 4 aa, ARTIFICIAL SEQUENCE
  Synthetic Construct
NKYN

SEQ ID NO: 1960 - protein, 4 aa, ARTIFICIAL SEQUENCE
  Synthetic Construct
NKYQ

SEQ ID NO: 1961 - protein, 4 aa, ARTIFICIAL SEQUENCE
  Synthetic Construct
NKYR

SEQ ID NO: 1962 - protein, 4 aa, ARTIFICIAL SEQUENCE
  Synthetic Construct
NKYS

SEQ ID NO: 1963 - protein, 4 aa, ARTIFICIAL SEQUENCE
  Synthetic Construct
NKYT

SEQ ID NO: 1964 - protein, 4 aa, ARTIFICIAL SEQUENCE
  Synthetic Construct
NKYY

SEQ ID NO: 1965 - protein, 4 aa, ARTIFICIAL SEQUENCE
  Synthetic Construct
PKAA

SEQ ID NO: 1966 - protein, 4 aa, ARTIFICIAL SEQUENCE
  Synthetic Construct
PKAD

SEQ ID NO: 1967 - protein, 4 aa, ARTIFICIAL SEQUENCE
  Synthetic Construct
PKAE

SEQ ID NO: 1968 - protein, 4 aa, ARTIFICIAL SEQUENCE
  Synthetic Construct
PKAF

SEQ ID NO: 1969 - protein, 4 aa, ARTIFICIAL SEQUENCE
  Synthetic Construct
PKAG

SEQ ID NO: 1970 - protein, 4 aa, ARTIFICIAL SEQUENCE
  Synthetic Construct
PKAH

SEQ ID NO: 1971 - protein, 4 aa, ARTIFICIAL SEQUENCE
  Synthetic Construct
PKAI

SEQ ID NO: 1972 - protein, 4 aa, ARTIFICIAL SEQUENCE
  Synthetic Construct
PKAL

SEQ ID NO: 1973 - protein, 4 aa, ARTIFICIAL SEQUENCE
  Synthetic Construct
PKAN

SEQ ID NO: 1974 - protein, 4 aa, ARTIFICIAL SEQUENCE
  Synthetic Construct
PKAQ

SEQ ID NO: 1975 - protein, 4 aa, ARTIFICIAL SEQUENCE
  Synthetic Construct
PKAR

SEQ ID NO: 1976 - protein, 4 aa, ARTIFICIAL SEQUENCE
  Synthetic Construct
PKAS

SEQ ID NO: 1977 - protein, 4 aa, ARTIFICIAL SEQUENCE
  Synthetic Construct
PKAT

SEQ ID NO: 1978 - protein, 4 aa, ARTIFICIAL SEQUENCE
  Synthetic Construct
PKAY

SEQ ID NO: 1979 - protein, 4 aa, ARTIFICIAL SEQUENCE
  Synthetic Construct
PKDA

SEQ ID NO: 1980 - protein, 4 aa, ARTIFICIAL SEQUENCE
  Synthetic Construct
PKDD

SEQ ID NO: 1981 - protein, 4 aa, ARTIFICIAL SEQUENCE
  Synthetic Construct
PKDE

SEQ ID NO: 1982 - protein, 4 aa, ARTIFICIAL SEQUENCE
  Synthetic Construct
PKDF

SEQ ID NO: 1983 - protein, 4 aa, ARTIFICIAL SEQUENCE
  Synthetic Construct
PKDG

SEQ ID NO: 1984 - protein, 4 aa, ARTIFICIAL SEQUENCE
  Synthetic Construct
PKDH

SEQ ID NO: 1985 - protein, 4 aa, ARTIFICIAL SEQUENCE
  Synthetic Construct
PKDI

SEQ ID NO: 1986 - protein, 4 aa, ARTIFICIAL SEQUENCE
  Synthetic Construct
PKDL

SEQ ID NO: 1987 - protein, 4 aa, ARTIFICIAL SEQUENCE
  Synthetic Construct
PKDN

SEQ ID NO: 1988 - protein, 4 aa, ARTIFICIAL SEQUENCE
  Synthetic Construct
PKDQ

SEQ ID NO: 1989 - protein, 4 aa, ARTIFICIAL SEQUENCE
  Synthetic Construct
PKDR

SEQ ID NO: 1990 - protein, 4 aa, ARTIFICIAL SEQUENCE
  Synthetic Construct
PKDS

SEQ ID NO: 1991 - protein, 4 aa, ARTIFICIAL SEQUENCE
  Synthetic Construct
PKDT

SEQ ID NO: 1992 - protein, 4 aa, ARTIFICIAL SEQUENCE
  Synthetic Construct
PKDY

SEQ ID NO: 1993 - protein, 4 aa, ARTIFICIAL SEQUENCE
  Synthetic Construct
PKEA

SEQ ID NO: 1994 - protein, 4 aa, ARTIFICIAL SEQUENCE
  Synthetic Construct
PKED

SEQ ID NO: 1995 - protein, 4 aa, ARTIFICIAL SEQUENCE
  Synthetic Construct
PKEE

SEQ ID NO: 1996 - protein, 4 aa, ARTIFICIAL SEQUENCE
  Synthetic Construct
PKEF

SEQ ID NO: 1997 - protein, 4 aa, ARTIFICIAL SEQUENCE
  Synthetic Construct
PKEG

SEQ ID NO: 1998 - protein, 4 aa, ARTIFICIAL SEQUENCE
  Synthetic Construct
PKEH

SEQ ID NO: 1999 - protein, 4 aa, ARTIFICIAL SEQUENCE
  Synthetic Construct
PKEI

SEQ ID NO: 2000 - protein, 4 aa, ARTIFICIAL SEQUENCE
  Synthetic Construct
PKEL

SEQ ID NO: 2001 - protein, 4 aa, ARTIFICIAL SEQUENCE
  Synthetic Construct
PKEN

SEQ ID NO: 2002 - protein, 4 aa, ARTIFICIAL SEQUENCE
  Synthetic Construct
PKEQ

SEQ ID NO: 2003 - protein, 4 aa, ARTIFICIAL SEQUENCE
  Synthetic Construct
PKER

SEQ ID NO: 2004 - protein, 4 aa, ARTIFICIAL SEQUENCE
  Synthetic Construct
PKES

SEQ ID NO: 2005 - protein, 4 aa, ARTIFICIAL SEQUENCE
  Synthetic Construct
PKET

SEQ ID NO: 2006 - protein, 4 aa, ARTIFICIAL SEQUENCE
  Synthetic Construct
PKEY

SEQ ID NO: 2007 - protein, 4 aa, ARTIFICIAL SEQUENCE
  Synthetic Construct
PKFA

SEQ ID NO: 2008 - protein, 4 aa, ARTIFICIAL SEQUENCE
  Synthetic Construct
PKFD

SEQ ID NO: 2009 - protein, 4 aa, ARTIFICIAL SEQUENCE
  Synthetic Construct
PKFE

SEQ ID NO: 2010 - protein, 4 aa, ARTIFICIAL SEQUENCE
  Synthetic Construct
PKFF

SEQ ID NO: 2011 - protein, 4 aa, ARTIFICIAL SEQUENCE
  Synthetic Construct
PKFG

SEQ ID NO: 2012 - protein, 4 aa, ARTIFICIAL SEQUENCE
  Synthetic Construct
PKFH

SEQ ID NO: 2013 - protein, 4 aa, ARTIFICIAL SEQUENCE
  Synthetic Construct
PKFI

SEQ ID NO: 2014 - protein, 4 aa, ARTIFICIAL SEQUENCE
  Synthetic Construct
PKFL

SEQ ID NO: 2015 - protein, 4 aa, ARTIFICIAL SEQUENCE
  Synthetic Construct
PKFN

SEQ ID NO: 2016 - protein, 4 aa, ARTIFICIAL SEQUENCE
  Synthetic Construct
PKFQ

SEQ ID NO: 2017 - protein, 4 aa, ARTIFICIAL SEQUENCE
  Synthetic Construct
PKFR

SEQ ID NO: 2018 - protein, 4 aa, ARTIFICIAL SEQUENCE
  Synthetic Construct
PKFS

SEQ ID NO: 2019 - protein, 4 aa, ARTIFICIAL SEQUENCE
  Synthetic Construct
PKFT

SEQ ID NO: 2020 - protein, 4 aa, ARTIFICIAL SEQUENCE
  Synthetic Construct
PKFY

SEQ ID NO: 2021 - protein, 4 aa, ARTIFICIAL SEQUENCE
  Synthetic Construct
PKGA

SEQ ID NO: 2022 - protein, 4 aa, ARTIFICIAL SEQUENCE
  Synthetic Construct
PKGD

SEQ ID NO: 2023 - protein, 4 aa, ARTIFICIAL SEQUENCE
  Synthetic Construct
PKGE

SEQ ID NO: 2024 - protein, 4 aa, ARTIFICIAL SEQUENCE
  Synthetic Construct
PKGF

SEQ ID NO: 2025 - protein, 4 aa, ARTIFICIAL SEQUENCE
  Synthetic Construct
PKGG

SEQ ID NO: 2026 - protein, 4 aa, ARTIFICIAL SEQUENCE
  Synthetic Construct
PKGH

SEQ ID NO: 2027 - protein, 4 aa, ARTIFICIAL SEQUENCE
  Synthetic Construct
PKGI

SEQ ID NO: 2028 - protein, 4 aa, ARTIFICIAL SEQUENCE
  Synthetic Construct
PKGL

SEQ ID NO: 2029 - protein, 4 aa, ARTIFICIAL SEQUENCE
  Synthetic Construct
PKGN

SEQ ID NO: 2030 - protein, 4 aa, ARTIFICIAL SEQUENCE
  Synthetic Construct
PKGQ

SEQ ID NO: 2031 - protein, 4 aa, ARTIFICIAL SEQUENCE
  Synthetic Construct
PKGR

SEQ ID NO: 2032 - protein, 4 aa, ARTIFICIAL SEQUENCE
  Synthetic Construct
PKGS

SEQ ID NO: 2033 - protein, 4 aa, ARTIFICIAL SEQUENCE
  Synthetic Construct
PKGT

SEQ ID NO: 2034 - protein, 4 aa, ARTIFICIAL SEQUENCE
  Synthetic Construct
PKGY

SEQ ID NO: 2035 - protein, 4 aa, ARTIFICIAL SEQUENCE
  Synthetic Construct
PKHA

SEQ ID NO: 2036 - protein, 4 aa, ARTIFICIAL SEQUENCE
  Synthetic Construct
PKHD

SEQ ID NO: 2037 - protein, 4 aa, ARTIFICIAL SEQUENCE
  Synthetic Construct
PKHE

SEQ ID NO: 2038 - protein, 4 aa, ARTIFICIAL SEQUENCE
  Synthetic Construct
PKHF

SEQ ID NO: 2039 - protein, 4 aa, ARTIFICIAL SEQUENCE
  Synthetic Construct
PKHG

SEQ ID NO: 2040 - protein, 4 aa, ARTIFICIAL SEQUENCE
  Synthetic Construct
PKHH

SEQ ID NO: 2041 - protein, 4 aa, ARTIFICIAL SEQUENCE
  Synthetic Construct
PKHI

SEQ ID NO: 2042 - protein, 4 aa, ARTIFICIAL SEQUENCE
  Synthetic Construct
PKHL

SEQ ID NO: 2043 - protein, 4 aa, ARTIFICIAL SEQUENCE
  Synthetic Construct
PKHN

SEQ ID NO: 2044 - protein, 4 aa, ARTIFICIAL SEQUENCE
  Synthetic Construct
PKHQ

SEQ ID NO: 2045 - protein, 4 aa, ARTIFICIAL SEQUENCE
  Synthetic Construct
PKHR

SEQ ID NO: 2046 - protein, 4 aa, ARTIFICIAL SEQUENCE
  Synthetic Construct
PKHS

SEQ ID NO: 2047 - protein, 4 aa, ARTIFICIAL SEQUENCE
  Synthetic Construct
PKHT

SEQ ID NO: 2048 - protein, 4 aa, ARTIFICIAL SEQUENCE
  Synthetic Construct
PKHY

SEQ ID NO: 2049 - protein, 4 aa, ARTIFICIAL SEQUENCE
  Synthetic Construct
PKIA

SEQ ID NO: 2050 - protein, 4 aa, ARTIFICIAL SEQUENCE
  Synthetic Construct
PKID

SEQ ID NO: 2051 - protein, 4 aa, ARTIFICIAL SEQUENCE
  Synthetic Construct
PKIE

SEQ ID NO: 2052 - protein, 4 aa, ARTIFICIAL SEQUENCE
  Synthetic Construct
PKIF

SEQ ID NO: 2053 - protein, 4 aa, ARTIFICIAL SEQUENCE
  Synthetic Construct
PKIG

SEQ ID NO: 2054 - protein, 4 aa, ARTIFICIAL SEQUENCE
  Synthetic Construct
PKIH

SEQ ID NO: 2055 - protein, 4 aa, ARTIFICIAL SEQUENCE
  Synthetic Construct
PKII

SEQ ID NO: 2056 - protein, 4 aa, ARTIFICIAL SEQUENCE
  Synthetic Construct
PKIL

SEQ ID NO: 2057 - protein, 4 aa, ARTIFICIAL SEQUENCE
  Synthetic Construct
PKIN

SEQ ID NO: 2058 - protein, 4 aa, ARTIFICIAL SEQUENCE
  Synthetic Construct
PKIQ

SEQ ID NO: 2059 - protein, 4 aa, ARTIFICIAL SEQUENCE
  Synthetic Construct
PKIR

SEQ ID NO: 2060 - protein, 4 aa, ARTIFICIAL SEQUENCE
  Synthetic Construct
PKIS

SEQ ID NO: 2061 - protein, 4 aa, ARTIFICIAL SEQUENCE
  Synthetic Construct
PKIT

SEQ ID NO: 2062 - protein, 4 aa, ARTIFICIAL SEQUENCE
  Synthetic Construct
PKIY

SEQ ID NO: 2063 - protein, 4 aa, ARTIFICIAL SEQUENCE
  Synthetic Construct
PKLA

SEQ ID NO: 2064 - protein, 4 aa, ARTIFICIAL SEQUENCE
  Synthetic Construct
PKLD

SEQ ID NO: 2065 - protein, 4 aa, ARTIFICIAL SEQUENCE
  Synthetic Construct
PKLE

SEQ ID NO: 2066 - protein, 4 aa, ARTIFICIAL SEQUENCE
  Synthetic Construct
PKLF

SEQ ID NO: 2067 - protein, 4 aa, ARTIFICIAL SEQUENCE
  Synthetic Construct
PKLG

SEQ ID NO: 2068 - protein, 4 aa, ARTIFICIAL SEQUENCE
  Synthetic Construct
PKLH

SEQ ID NO: 2069 - protein, 4 aa, ARTIFICIAL SEQUENCE
  Synthetic Construct
PKLI

SEQ ID NO: 2070 - protein, 4 aa, ARTIFICIAL SEQUENCE
  Synthetic Construct
PKLL

SEQ ID NO: 2071 - protein, 4 aa, ARTIFICIAL SEQUENCE
  Synthetic Construct
PKLN

SEQ ID NO: 2072 - protein, 4 aa, ARTIFICIAL SEQUENCE
  Synthetic Construct
PKLQ

SEQ ID NO: 2073 - protein, 4 aa, ARTIFICIAL SEQUENCE
  Synthetic Construct
PKLR

SEQ ID NO: 2074 - protein, 4 aa, ARTIFICIAL SEQUENCE
  Synthetic Construct
PKLS

SEQ ID NO: 2075 - protein, 4 aa, ARTIFICIAL SEQUENCE
  Synthetic Construct
PKLT

SEQ ID NO: 2076 - protein, 4 aa, ARTIFICIAL SEQUENCE
  Synthetic Construct
PKLY

SEQ ID NO: 2077 - protein, 4 aa, ARTIFICIAL SEQUENCE
  Synthetic Construct
PKNA

SEQ ID NO: 2078 - protein, 4 aa, ARTIFICIAL SEQUENCE
  Synthetic Construct
PKND

SEQ ID NO: 2079 - protein, 4 aa, ARTIFICIAL SEQUENCE
  Synthetic Construct
PKNE

SEQ ID NO: 2080 - protein, 4 aa, ARTIFICIAL SEQUENCE
  Synthetic Construct
PKNF

SEQ ID NO: 2081 - protein, 4 aa, ARTIFICIAL SEQUENCE
  Synthetic Construct
PKNG

SEQ ID NO: 2082 - protein, 4 aa, ARTIFICIAL SEQUENCE
  Synthetic Construct
PKNH

SEQ ID NO: 2083 - protein, 4 aa, ARTIFICIAL SEQUENCE
  Synthetic Construct
PKNI

SEQ ID NO: 2084 - protein, 4 aa, ARTIFICIAL SEQUENCE
  Synthetic Construct
PKNL

SEQ ID NO: 2085 - protein, 4 aa, ARTIFICIAL SEQUENCE
  Synthetic Construct
PKNN

SEQ ID NO: 2086 - protein, 4 aa, ARTIFICIAL SEQUENCE
  Synthetic Construct
PKNQ

SEQ ID NO: 2087 - protein, 4 aa, ARTIFICIAL SEQUENCE
  Synthetic Construct
PKNR

SEQ ID NO: 2088 - protein, 4 aa, ARTIFICIAL SEQUENCE
  Synthetic Construct
PKNS

SEQ ID NO: 2089 - protein, 4 aa, ARTIFICIAL SEQUENCE
  Synthetic Construct
PKNT

SEQ ID NO: 2090 - protein, 4 aa, ARTIFICIAL SEQUENCE
  Synthetic Construct
PKNY

SEQ ID NO: 2091 - protein, 4 aa, ARTIFICIAL SEQUENCE
  Synthetic Construct
PKPA

SEQ ID NO: 2092 - protein, 4 aa, ARTIFICIAL SEQUENCE
  Synthetic Construct
PKPD

SEQ ID NO: 2093 - protein, 4 aa, ARTIFICIAL SEQUENCE
  Synthetic Construct
PKPE

SEQ ID NO: 2094 - protein, 4 aa, ARTIFICIAL SEQUENCE
  Synthetic Construct
PKPF

SEQ ID NO: 2095 - protein, 4 aa, ARTIFICIAL SEQUENCE
  Synthetic Construct
PKPG

SEQ ID NO: 2096 - protein, 4 aa, ARTIFICIAL SEQUENCE
  Synthetic Construct
PKPH

SEQ ID NO: 2097 - protein, 4 aa, ARTIFICIAL SEQUENCE
  Synthetic Construct
PKPI

SEQ ID NO: 2098 - protein, 4 aa, ARTIFICIAL SEQUENCE
  Synthetic Construct
PKPL

SEQ ID NO: 2099 - protein, 4 aa, ARTIFICIAL SEQUENCE
  Synthetic Construct
PKPN

SEQ ID NO: 2100 - protein, 4 aa, ARTIFICIAL SEQUENCE
  Synthetic Construct
PKPQ

SEQ ID NO: 2101 - protein, 4 aa, ARTIFICIAL SEQUENCE
  Synthetic Construct
PKPR

SEQ ID NO: 2102 - protein, 4 aa, ARTIFICIAL SEQUENCE
  Synthetic Construct
PKPS

SEQ ID NO: 2103 - protein, 4 aa, ARTIFICIAL SEQUENCE
  Synthetic Construct
PKPT

SEQ ID NO: 2104 - protein, 4 aa, ARTIFICIAL SEQUENCE
  Synthetic Construct
PKPY

SEQ ID NO: 2105 - protein, 4 aa, ARTIFICIAL SEQUENCE
  Synthetic Construct
PKQA

SEQ ID NO: 2106 - protein, 4 aa, ARTIFICIAL SEQUENCE
  Synthetic Construct
PKQD

SEQ ID NO: 2107 - protein, 4 aa, ARTIFICIAL SEQUENCE
  Synthetic Construct
PKQE

SEQ ID NO: 2108 - protein, 4 aa, ARTIFICIAL SEQUENCE
  Synthetic Construct
PKQF

SEQ ID NO: 2109 - protein, 4 aa, ARTIFICIAL SEQUENCE
  Synthetic Construct
PKQG

SEQ ID NO: 2110 - protein, 4 aa, ARTIFICIAL SEQUENCE
  Synthetic Construct
PKQH

SEQ ID NO: 2111 - protein, 4 aa, ARTIFICIAL SEQUENCE
  Synthetic Construct
PKQI

SEQ ID NO: 2112 - protein, 4 aa, ARTIFICIAL SEQUENCE
  Synthetic Construct
PKQL

SEQ ID NO: 2113 - protein, 4 aa, ARTIFICIAL SEQUENCE
  Synthetic Construct
PKQN

SEQ ID NO: 2114 - protein, 4 aa, ARTIFICIAL SEQUENCE
  Synthetic Construct
PKQQ

SEQ ID NO: 2115 - protein, 4 aa, ARTIFICIAL SEQUENCE
  Synthetic Construct
PKQR

SEQ ID NO: 2116 - protein, 4 aa, ARTIFICIAL SEQUENCE
  Synthetic Construct
PKQS

SEQ ID NO: 2117 - protein, 4 aa, ARTIFICIAL SEQUENCE
  Synthetic Construct
PKQT

SEQ ID NO: 2118 - protein, 4 aa, ARTIFICIAL SEQUENCE
  Synthetic Construct
PKQY

SEQ ID NO: 2119 - protein, 4 aa, ARTIFICIAL SEQUENCE
  Synthetic Construct
PKRA

SEQ ID NO: 2120 - protein, 4 aa, ARTIFICIAL SEQUENCE
  Synthetic Construct
PKRD

SEQ ID NO: 2121 - protein, 4 aa, ARTIFICIAL SEQUENCE
  Synthetic Construct
PKRE

SEQ ID NO: 2122 - protein, 4 aa, ARTIFICIAL SEQUENCE
  Synthetic Construct
PKRF

SEQ ID NO: 2123 - protein, 4 aa, ARTIFICIAL SEQUENCE
  Synthetic Construct
PKRG

SEQ ID NO: 2124 - protein, 4 aa, ARTIFICIAL SEQUENCE
  Synthetic Construct
PKRH

SEQ ID NO: 2125 - protein, 4 aa, ARTIFICIAL SEQUENCE
  Synthetic Construct
PKRI

SEQ ID NO: 2126 - protein, 4 aa, ARTIFICIAL SEQUENCE
  Synthetic Construct
PKRL

SEQ ID NO: 2127 - protein, 4 aa, ARTIFICIAL SEQUENCE
  Synthetic Construct
PKRN

SEQ ID NO: 2128 - protein, 4 aa, ARTIFICIAL SEQUENCE
  Synthetic Construct
PKRQ

SEQ ID NO: 2129 - protein, 4 aa, ARTIFICIAL SEQUENCE
  Synthetic Construct
PKRR

SEQ ID NO: 2130 - protein, 4 aa, ARTIFICIAL SEQUENCE
  Synthetic Construct
PKRS

SEQ ID NO: 2131 - protein, 4 aa, ARTIFICIAL SEQUENCE
  Synthetic Construct
PKRT

SEQ ID NO: 2132 - protein, 4 aa, ARTIFICIAL SEQUENCE
  Synthetic Construct
PKRY

SEQ ID NO: 2133 - protein, 4 aa, ARTIFICIAL SEQUENCE
  Synthetic Construct
PKSA

SEQ ID NO: 2134 - protein, 4 aa, ARTIFICIAL SEQUENCE
  Synthetic Construct
PKSD

SEQ ID NO: 2135 - protein, 4 aa, ARTIFICIAL SEQUENCE
  Synthetic Construct
PKSE

SEQ ID NO: 2136 - protein, 4 aa, ARTIFICIAL SEQUENCE
  Synthetic Construct
PKSF

SEQ ID NO: 2137 - protein, 4 aa, ARTIFICIAL SEQUENCE
  Synthetic Construct
PKSG

SEQ ID NO: 2138 - protein, 4 aa, ARTIFICIAL SEQUENCE
  Synthetic Construct
PKSH

SEQ ID NO: 2139 - protein, 4 aa, ARTIFICIAL SEQUENCE
  Synthetic Construct
PKSI

SEQ ID NO: 2140 - protein, 4 aa, ARTIFICIAL SEQUENCE
  Synthetic Construct
PKSL

SEQ ID NO: 2141 - protein, 4 aa, ARTIFICIAL SEQUENCE
  Synthetic Construct
PKSN

SEQ ID NO: 2142 - protein, 4 aa, ARTIFICIAL SEQUENCE
  Synthetic Construct
PKSQ

SEQ ID NO: 2143 - protein, 4 aa, ARTIFICIAL SEQUENCE
  Synthetic Construct
PKSR

SEQ ID NO: 2144 - protein, 4 aa, ARTIFICIAL SEQUENCE
  Synthetic Construct
PKSS

SEQ ID NO: 2145 - protein, 4 aa, ARTIFICIAL SEQUENCE
  Synthetic Construct
PKST

SEQ ID NO: 2146 - protein, 4 aa, ARTIFICIAL SEQUENCE
  Synthetic Construct
PKSY

SEQ ID NO: 2147 - protein, 4 aa, ARTIFICIAL SEQUENCE
  Synthetic Construct
PKTA

SEQ ID NO: 2148 - protein, 4 aa, ARTIFICIAL SEQUENCE
  Synthetic Construct
PKTD

SEQ ID NO: 2149 - protein, 4 aa, ARTIFICIAL SEQUENCE
  Synthetic Construct
PKTE

SEQ ID NO: 2150 - protein, 4 aa, ARTIFICIAL SEQUENCE
  Synthetic Construct
PKTF

SEQ ID NO: 2151 - protein, 4 aa, ARTIFICIAL SEQUENCE
  Synthetic Construct
PKTG

SEQ ID NO: 2152 - protein, 4 aa, ARTIFICIAL SEQUENCE
  Synthetic Construct
PKTH

SEQ ID NO: 2153 - protein, 4 aa, ARTIFICIAL SEQUENCE
  Synthetic Construct
PKTI

SEQ ID NO: 2154 - protein, 4 aa, ARTIFICIAL SEQUENCE
  Synthetic Construct
PKTL

SEQ ID NO: 2155 - protein, 4 aa, ARTIFICIAL SEQUENCE
  Synthetic Construct
PKTN

SEQ ID NO: 2156 - protein, 4 aa, ARTIFICIAL SEQUENCE
  Synthetic Construct
PKTQ

SEQ ID NO: 2157 - protein, 4 aa, ARTIFICIAL SEQUENCE
  Synthetic Construct
PKTR

SEQ ID NO: 2158 - protein, 4 aa, ARTIFICIAL SEQUENCE
  Synthetic Construct
PKTS

SEQ ID NO: 2159 - protein, 4 aa, ARTIFICIAL SEQUENCE
  Synthetic Construct
PKTT

SEQ ID NO: 2160 - protein, 4 aa, ARTIFICIAL SEQUENCE
  Synthetic Construct
PKTY

SEQ ID NO: 2161 - protein, 4 aa, ARTIFICIAL SEQUENCE
  Synthetic Construct
PKYA

SEQ ID NO: 2162 - protein, 4 aa, ARTIFICIAL SEQUENCE
  Synthetic Construct
PKYD

SEQ ID NO: 2163 - protein, 4 aa, ARTIFICIAL SEQUENCE
  Synthetic Construct
PKYE

SEQ ID NO: 2164 - protein, 4 aa, ARTIFICIAL SEQUENCE
  Synthetic Construct
PKYF

SEQ ID NO: 2165 - protein, 4 aa, ARTIFICIAL SEQUENCE
  Synthetic Construct
PKYG

SEQ ID NO: 2166 - protein, 4 aa, ARTIFICIAL SEQUENCE
  Synthetic Construct
PKYH

SEQ ID NO: 2167 - protein, 4 aa, ARTIFICIAL SEQUENCE
  Synthetic Construct
PKYI

SEQ ID NO: 2168 - protein, 4 aa, ARTIFICIAL SEQUENCE
  Synthetic Construct
PKYL

SEQ ID NO: 2169 - protein, 4 aa, ARTIFICIAL SEQUENCE
  Synthetic Construct
PKYN

SEQ ID NO: 2170 - protein, 4 aa, ARTIFICIAL SEQUENCE
  Synthetic Construct
PKYQ

SEQ ID NO: 2171 - protein, 4 aa, ARTIFICIAL SEQUENCE
  Synthetic Construct
PKYR

SEQ ID NO: 2172 - protein, 4 aa, ARTIFICIAL SEQUENCE
  Synthetic Construct
PKYS

SEQ ID NO: 2173 - protein, 4 aa, ARTIFICIAL SEQUENCE
  Synthetic Construct
PKYT

SEQ ID NO: 2174 - protein, 4 aa, ARTIFICIAL SEQUENCE
  Synthetic Construct
PKYY

SEQ ID NO: 2175 - protein, 4 aa, ARTIFICIAL SEQUENCE
  Synthetic Construct
QKAA

SEQ ID NO: 2176 - protein, 4 aa, ARTIFICIAL SEQUENCE
  Synthetic Construct
QKAD

SEQ ID NO: 2177 - protein, 4 aa, ARTIFICIAL SEQUENCE
  Synthetic Construct
QKAE

SEQ ID NO: 2178 - protein, 4 aa, ARTIFICIAL SEQUENCE
  Synthetic Construct
QKAF

SEQ ID NO: 2179 - protein, 4 aa, ARTIFICIAL SEQUENCE
  Synthetic Construct
QKAG

SEQ ID NO: 2180 - protein, 4 aa, ARTIFICIAL SEQUENCE
  Synthetic Construct
QKAH

SEQ ID NO: 2181 - protein, 4 aa, ARTIFICIAL SEQUENCE
  Synthetic Construct
QKAI

SEQ ID NO: 2182 - protein, 4 aa, ARTIFICIAL SEQUENCE
  Synthetic Construct
QKAL

SEQ ID NO: 2183 - protein, 4 aa, ARTIFICIAL SEQUENCE
  Synthetic Construct
QKAN

SEQ ID NO: 2184 - protein, 4 aa, ARTIFICIAL SEQUENCE
  Synthetic Construct
QKAQ

SEQ ID NO: 2185 - protein, 4 aa, ARTIFICIAL SEQUENCE
  Synthetic Construct
QKAR

SEQ ID NO: 2186 - protein, 4 aa, ARTIFICIAL SEQUENCE
  Synthetic Construct
QKAS

SEQ ID NO: 2187 - protein, 4 aa, ARTIFICIAL SEQUENCE
  Synthetic Construct
QKAT

SEQ ID NO: 2188 - protein, 4 aa, ARTIFICIAL SEQUENCE
  Synthetic Construct
QKAY

SEQ ID NO: 2189 - protein, 4 aa, ARTIFICIAL SEQUENCE
  Synthetic Construct
QKDA

SEQ ID NO: 2190 - protein, 4 aa, ARTIFICIAL SEQUENCE
  Synthetic Construct
QKDD

SEQ ID NO: 2191 - protein, 4 aa, ARTIFICIAL SEQUENCE
  Synthetic Construct
QKDE

SEQ ID NO: 2192 - protein, 4 aa, ARTIFICIAL SEQUENCE
  Synthetic Construct
QKDF

SEQ ID NO: 2193 - protein, 4 aa, ARTIFICIAL SEQUENCE
  Synthetic Construct
QKDG

SEQ ID NO: 2194 - protein, 4 aa, ARTIFICIAL SEQUENCE
  Synthetic Construct
QKDH

SEQ ID NO: 2195 - protein, 4 aa, ARTIFICIAL SEQUENCE
  Synthetic Construct
QKDI

SEQ ID NO: 2196 - protein, 4 aa, ARTIFICIAL SEQUENCE
  Synthetic Construct
QKDL

SEQ ID NO: 2197 - protein, 4 aa, ARTIFICIAL SEQUENCE
  Synthetic Construct
QKDN

SEQ ID NO: 2198 - protein, 4 aa, ARTIFICIAL SEQUENCE
  Synthetic Construct
QKDQ

SEQ ID NO: 2199 - protein, 4 aa, ARTIFICIAL SEQUENCE
  Synthetic Construct
QKDR

SEQ ID NO: 2200 - protein, 4 aa, ARTIFICIAL SEQUENCE
  Synthetic Construct
QKDS

SEQ ID NO: 2201 - protein, 4 aa, ARTIFICIAL SEQUENCE
  Synthetic Construct
QKDT

SEQ ID NO: 2202 - protein, 4 aa, ARTIFICIAL SEQUENCE
  Synthetic Construct
QKDY

SEQ ID NO: 2203 - protein, 4 aa, ARTIFICIAL SEQUENCE
  Synthetic Construct
QKEA

SEQ ID NO: 2204 - protein, 4 aa, ARTIFICIAL SEQUENCE
  Synthetic Construct
QKED

SEQ ID NO: 2205 - protein, 4 aa, ARTIFICIAL SEQUENCE
  Synthetic Construct
QKEE

SEQ ID NO: 2206 - protein, 4 aa, ARTIFICIAL SEQUENCE
  Synthetic Construct
QKEF

SEQ ID NO: 2207 - protein, 4 aa, ARTIFICIAL SEQUENCE
  Synthetic Construct
QKEG

SEQ ID NO: 2208 - protein, 4 aa, ARTIFICIAL SEQUENCE
  Synthetic Construct
QKEH

SEQ ID NO: 2209 - protein, 4 aa, ARTIFICIAL SEQUENCE
  Synthetic Construct
QKEI

SEQ ID NO: 2210 - protein, 4 aa, ARTIFICIAL SEQUENCE
  Synthetic Construct
QKEL

SEQ ID NO: 2211 - protein, 4 aa, ARTIFICIAL SEQUENCE
  Synthetic Construct
QKEN

SEQ ID NO: 2212 - protein, 4 aa, ARTIFICIAL SEQUENCE
  Synthetic Construct
QKEQ

SEQ ID NO: 2213 - protein, 4 aa, ARTIFICIAL SEQUENCE
  Synthetic Construct
QKER

SEQ ID NO: 2214 - protein, 4 aa, ARTIFICIAL SEQUENCE
  Synthetic Construct
QKES

SEQ ID NO: 2215 - protein, 4 aa, ARTIFICIAL SEQUENCE
  Synthetic Construct
QKET

SEQ ID NO: 2216 - protein, 4 aa, ARTIFICIAL SEQUENCE
  Synthetic Construct
QKEY

SEQ ID NO: 2217 - protein, 4 aa, ARTIFICIAL SEQUENCE
  Synthetic Construct
QKFA

SEQ ID NO: 2218 - protein, 4 aa, ARTIFICIAL SEQUENCE
  Synthetic Construct
QKFD

SEQ ID NO: 2219 - protein, 4 aa, ARTIFICIAL SEQUENCE
  Synthetic Construct
QKFE

SEQ ID NO: 2220 - protein, 4 aa, ARTIFICIAL SEQUENCE
  Synthetic Construct
QKFF

SEQ ID NO: 2221 - protein, 4 aa, ARTIFICIAL SEQUENCE
  Synthetic Construct
QKFG

SEQ ID NO: 2222 - protein, 4 aa, ARTIFICIAL SEQUENCE
  Synthetic Construct
QKFH

SEQ ID NO: 2223 - protein, 4 aa, ARTIFICIAL SEQUENCE
  Synthetic Construct
QKFI

SEQ ID NO: 2224 - protein, 4 aa, ARTIFICIAL SEQUENCE
  Synthetic Construct
QKFL

SEQ ID NO: 2225 - protein, 4 aa, ARTIFICIAL SEQUENCE
  Synthetic Construct
QKFN

SEQ ID NO: 2226 - protein, 4 aa, ARTIFICIAL SEQUENCE
  Synthetic Construct
QKFQ

SEQ ID NO: 2227 - protein, 4 aa, ARTIFICIAL SEQUENCE
  Synthetic Construct
QKFR

SEQ ID NO: 2228 - protein, 4 aa, ARTIFICIAL SEQUENCE
  Synthetic Construct
QKFS

SEQ ID NO: 2229 - protein, 4 aa, ARTIFICIAL SEQUENCE
  Synthetic Construct
QKFT

SEQ ID NO: 2230 - protein, 4 aa, ARTIFICIAL SEQUENCE
  Synthetic Construct
QKFY

SEQ ID NO: 2231 - protein, 4 aa, ARTIFICIAL SEQUENCE
  Synthetic Construct
QKGA

SEQ ID NO: 2232 - protein, 4 aa, ARTIFICIAL SEQUENCE
  Synthetic Construct
QKGD

SEQ ID NO: 2233 - protein, 4 aa, ARTIFICIAL SEQUENCE
  Synthetic Construct
QKGE

SEQ ID NO: 2234 - protein, 4 aa, ARTIFICIAL SEQUENCE
  Synthetic Construct
QKGF

SEQ ID NO: 2235 - protein, 4 aa, ARTIFICIAL SEQUENCE
  Synthetic Construct
QKGG

SEQ ID NO: 2236 - protein, 4 aa, ARTIFICIAL SEQUENCE
  Synthetic Construct
QKGH

SEQ ID NO: 2237 - protein, 4 aa, ARTIFICIAL SEQUENCE
  Synthetic Construct
QKGI

SEQ ID NO: 2238 - protein, 4 aa, ARTIFICIAL SEQUENCE
  Synthetic Construct
QKGL

SEQ ID NO: 2239 - protein, 4 aa, ARTIFICIAL SEQUENCE
  Synthetic Construct
QKGN

SEQ ID NO: 2240 - protein, 4 aa, ARTIFICIAL SEQUENCE
  Synthetic Construct
QKGQ

SEQ ID NO: 2241 - protein, 4 aa, ARTIFICIAL SEQUENCE
  Synthetic Construct
QKGR

SEQ ID NO: 2242 - protein, 4 aa, ARTIFICIAL SEQUENCE
  Synthetic Construct
QKGS

SEQ ID NO: 2243 - protein, 4 aa, ARTIFICIAL SEQUENCE
  Synthetic Construct
QKGT

SEQ ID NO: 2244 - protein, 4 aa, ARTIFICIAL SEQUENCE
  Synthetic Construct
QKGY

SEQ ID NO: 2245 - protein, 4 aa, ARTIFICIAL SEQUENCE
  Synthetic Construct
QKHA

SEQ ID NO: 2246 - protein, 4 aa, ARTIFICIAL SEQUENCE
  Synthetic Construct
QKHD

SEQ ID NO: 2247 - protein, 4 aa, ARTIFICIAL SEQUENCE
  Synthetic Construct
QKHE

SEQ ID NO: 2248 - protein, 4 aa, ARTIFICIAL SEQUENCE
  Synthetic Construct
QKHF

SEQ ID NO: 2249 - protein, 4 aa, ARTIFICIAL SEQUENCE
  Synthetic Construct
QKHG

SEQ ID NO: 2250 - protein, 4 aa, ARTIFICIAL SEQUENCE
  Synthetic Construct
QKHH

SEQ ID NO: 2251 - protein, 4 aa, ARTIFICIAL SEQUENCE
  Synthetic Construct
QKHI

SEQ ID NO: 2252 - protein, 4 aa, ARTIFICIAL SEQUENCE
  Synthetic Construct
QKHL

SEQ ID NO: 2253 - protein, 4 aa, ARTIFICIAL SEQUENCE
  Synthetic Construct
QKHN

SEQ ID NO: 2254 - protein, 4 aa, ARTIFICIAL SEQUENCE
  Synthetic Construct
QKHQ

SEQ ID NO: 2255 - protein, 4 aa, ARTIFICIAL SEQUENCE
  Synthetic Construct
QKHR

SEQ ID NO: 2256 - protein, 4 aa, ARTIFICIAL SEQUENCE
  Synthetic Construct
QKHS

SEQ ID NO: 2257 - protein, 4 aa, ARTIFICIAL SEQUENCE
  Synthetic Construct
QKHT

SEQ ID NO: 2258 - protein, 4 aa, ARTIFICIAL SEQUENCE
  Synthetic Construct
QKHY

SEQ ID NO: 2259 - protein, 4 aa, ARTIFICIAL SEQUENCE
  Synthetic Construct
QKIA

SEQ ID NO: 2260 - protein, 4 aa, ARTIFICIAL SEQUENCE
  Synthetic Construct
QKID

SEQ ID NO: 2261 - protein, 4 aa, ARTIFICIAL SEQUENCE
  Synthetic Construct
QKIE

SEQ ID NO: 2262 - protein, 4 aa, ARTIFICIAL SEQUENCE
  Synthetic Construct
QKIF

SEQ ID NO: 2263 - protein, 4 aa, ARTIFICIAL SEQUENCE
  Synthetic Construct
QKIG

SEQ ID NO: 2264 - protein, 4 aa, ARTIFICIAL SEQUENCE
  Synthetic Construct
QKIH

SEQ ID NO: 2265 - protein, 4 aa, ARTIFICIAL SEQUENCE
  Synthetic Construct
QKII

SEQ ID NO: 2266 - protein, 4 aa, ARTIFICIAL SEQUENCE
  Synthetic Construct
QKIL

SEQ ID NO: 2267 - protein, 4 aa, ARTIFICIAL SEQUENCE
  Synthetic Construct
QKIN

SEQ ID NO: 2268 - protein, 4 aa, ARTIFICIAL SEQUENCE
  Synthetic Construct
QKIQ

SEQ ID NO: 2269 - protein, 4 aa, ARTIFICIAL SEQUENCE
  Synthetic Construct
QKIR

SEQ ID NO: 2270 - protein, 4 aa, ARTIFICIAL SEQUENCE
  Synthetic Construct
QKIS

SEQ ID NO: 2271 - protein, 4 aa, ARTIFICIAL SEQUENCE
  Synthetic Construct
QKIT

SEQ ID NO: 2272 - protein, 4 aa, ARTIFICIAL SEQUENCE
  Synthetic Construct
QKIY

SEQ ID NO: 2273 - protein, 4 aa, ARTIFICIAL SEQUENCE
  Synthetic Construct
QKLA

SEQ ID NO: 2274 - protein, 4 aa, ARTIFICIAL SEQUENCE
  Synthetic Construct
QKLD

SEQ ID NO: 2275 - protein, 4 aa, ARTIFICIAL SEQUENCE
  Synthetic Construct
QKLE

SEQ ID NO: 2276 - protein, 4 aa, ARTIFICIAL SEQUENCE
  Synthetic Construct
QKLF

SEQ ID NO: 2277 - protein, 4 aa, ARTIFICIAL SEQUENCE
  Synthetic Construct
QKLG

SEQ ID NO: 2278 - protein, 4 aa, ARTIFICIAL SEQUENCE
  Synthetic Construct
QKLH

SEQ ID NO: 2279 - protein, 4 aa, ARTIFICIAL SEQUENCE
  Synthetic Construct
QKLI

SEQ ID NO: 2280 - protein, 4 aa, ARTIFICIAL SEQUENCE
  Synthetic Construct
QKLL

SEQ ID NO: 2281 - protein, 4 aa, ARTIFICIAL SEQUENCE
  Synthetic Construct
QKLN

SEQ ID NO: 2282 - protein, 4 aa, ARTIFICIAL SEQUENCE
  Synthetic Construct
QKLQ

SEQ ID NO: 2283 - protein, 4 aa, ARTIFICIAL SEQUENCE
  Synthetic Construct
QKLR

SEQ ID NO: 2284 - protein, 4 aa, ARTIFICIAL SEQUENCE
  Synthetic Construct
QKLS

SEQ ID NO: 2285 - protein, 4 aa, ARTIFICIAL SEQUENCE
  Synthetic Construct
QKLT

SEQ ID NO: 2286 - protein, 4 aa, ARTIFICIAL SEQUENCE
  Synthetic Construct
QKLY

SEQ ID NO: 2287 - protein, 4 aa, ARTIFICIAL SEQUENCE
  Synthetic Construct
QKNA

SEQ ID NO: 2288 - protein, 4 aa, ARTIFICIAL SEQUENCE
  Synthetic Construct
QKND

SEQ ID NO: 2289 - protein, 4 aa, ARTIFICIAL SEQUENCE
  Synthetic Construct
QKNE

SEQ ID NO: 2290 - protein, 4 aa, ARTIFICIAL SEQUENCE
  Synthetic Construct
QKNF

SEQ ID NO: 2291 - protein, 4 aa, ARTIFICIAL SEQUENCE
  Synthetic Construct
QKNG

SEQ ID NO: 2292 - protein, 4 aa, ARTIFICIAL SEQUENCE
  Synthetic Construct
QKNH

SEQ ID NO: 2293 - protein, 4 aa, ARTIFICIAL SEQUENCE
  Synthetic Construct
QKNI

SEQ ID NO: 2294 - protein, 4 aa, ARTIFICIAL SEQUENCE
  Synthetic Construct
QKNL

SEQ ID NO: 2295 - protein, 4 aa, ARTIFICIAL SEQUENCE
  Synthetic Construct
QKNN

SEQ ID NO: 2296 - protein, 4 aa, ARTIFICIAL SEQUENCE
  Synthetic Construct
QKNQ

SEQ ID NO: 2297 - protein, 4 aa, ARTIFICIAL SEQUENCE
  Synthetic Construct
QKNR

SEQ ID NO: 2298 - protein, 4 aa, ARTIFICIAL SEQUENCE
  Synthetic Construct
QKNS

SEQ ID NO: 2299 - protein, 4 aa, ARTIFICIAL SEQUENCE
  Synthetic Construct
QKNT

SEQ ID NO: 2300 - protein, 4 aa, ARTIFICIAL SEQUENCE
  Synthetic Construct
QKNY

SEQ ID NO: 2301 - protein, 4 aa, ARTIFICIAL SEQUENCE
  Synthetic Construct
QKPA

SEQ ID NO: 2302 - protein, 4 aa, ARTIFICIAL SEQUENCE
  Synthetic Construct
QKPD

SEQ ID NO: 2303 - protein, 4 aa, ARTIFICIAL SEQUENCE
  Synthetic Construct
QKPE

SEQ ID NO: 2304 - protein, 4 aa, ARTIFICIAL SEQUENCE
  Synthetic Construct
QKPF

SEQ ID NO: 2305 - protein, 4 aa, ARTIFICIAL SEQUENCE
  Synthetic Construct
QKPG

SEQ ID NO: 2306 - protein, 4 aa, ARTIFICIAL SEQUENCE
  Synthetic Construct
QKPH

SEQ ID NO: 2307 - protein, 4 aa, ARTIFICIAL SEQUENCE
  Synthetic Construct
QKPI

SEQ ID NO: 2308 - protein, 4 aa, ARTIFICIAL SEQUENCE
  Synthetic Construct
QKPL

SEQ ID NO: 2309 - protein, 4 aa, ARTIFICIAL SEQUENCE
  Synthetic Construct
QKPN

SEQ ID NO: 2310 - protein, 4 aa, ARTIFICIAL SEQUENCE
  Synthetic Construct
QKPQ

SEQ ID NO: 2311 - protein, 4 aa, ARTIFICIAL SEQUENCE
  Synthetic Construct
QKPR

SEQ ID NO: 2312 - protein, 4 aa, ARTIFICIAL SEQUENCE
  Synthetic Construct
QKPS

SEQ ID NO: 2313 - protein, 4 aa, ARTIFICIAL SEQUENCE
  Synthetic Construct
QKPT

SEQ ID NO: 2314 - protein, 4 aa, ARTIFICIAL SEQUENCE
  Synthetic Construct
QKPY

SEQ ID NO: 2315 - protein, 4 aa, ARTIFICIAL SEQUENCE
  Synthetic Construct
QKQA

SEQ ID NO: 2316 - protein, 4 aa, ARTIFICIAL SEQUENCE
  Synthetic Construct
QKQD

SEQ ID NO: 2317 - protein, 4 aa, ARTIFICIAL SEQUENCE
  Synthetic Construct
QKQE

SEQ ID NO: 2318 - protein, 4 aa, ARTIFICIAL SEQUENCE
  Synthetic Construct
QKQF

SEQ ID NO: 2319 - protein, 4 aa, ARTIFICIAL SEQUENCE
  Synthetic Construct
QKQG

SEQ ID NO: 2320 - protein, 4 aa, ARTIFICIAL SEQUENCE
  Synthetic Construct
QKQH

SEQ ID NO: 2321 - protein, 4 aa, ARTIFICIAL SEQUENCE
  Synthetic Construct
QKQI

SEQ ID NO: 2322 - protein, 4 aa, ARTIFICIAL SEQUENCE
  Synthetic Construct
QKQL

SEQ ID NO: 2323 - protein, 4 aa, ARTIFICIAL SEQUENCE
  Synthetic Construct
QKQN

SEQ ID NO: 2324 - protein, 4 aa, ARTIFICIAL SEQUENCE
  Synthetic Construct
QKQQ

SEQ ID NO: 2325 - protein, 4 aa, ARTIFICIAL SEQUENCE
  Synthetic Construct
QKQR

SEQ ID NO: 2326 - protein, 4 aa, ARTIFICIAL SEQUENCE
  Synthetic Construct
QKQS

SEQ ID NO: 2327 - protein, 4 aa, ARTIFICIAL SEQUENCE
  Synthetic Construct
QKQT

SEQ ID NO: 2328 - protein, 4 aa, ARTIFICIAL SEQUENCE
  Synthetic Construct
QKQY

SEQ ID NO: 2329 - protein, 4 aa, ARTIFICIAL SEQUENCE
  Synthetic Construct
QKRA

SEQ ID NO: 2330 - protein, 4 aa, ARTIFICIAL SEQUENCE
  Synthetic Construct
QKRD

SEQ ID NO: 2331 - protein, 4 aa, ARTIFICIAL SEQUENCE
  Synthetic Construct
QKRE

SEQ ID NO: 2332 - protein, 4 aa, ARTIFICIAL SEQUENCE
  Synthetic Construct
QKRF

SEQ ID NO: 2333 - protein, 4 aa, ARTIFICIAL SEQUENCE
  Synthetic Construct
QKRG

SEQ ID NO: 2334 - protein, 4 aa, ARTIFICIAL SEQUENCE
  Synthetic Construct
QKRH

SEQ ID NO: 2335 - protein, 4 aa, ARTIFICIAL SEQUENCE
  Synthetic Construct
QKRI

SEQ ID NO: 2336 - protein, 4 aa, ARTIFICIAL SEQUENCE
  Synthetic Construct
QKRL

SEQ ID NO: 2337 - protein, 4 aa, ARTIFICIAL SEQUENCE
  Synthetic Construct
QKRN

SEQ ID NO: 2338 - protein, 4 aa, ARTIFICIAL SEQUENCE
  Synthetic Construct
QKRQ

SEQ ID NO: 2339 - protein, 4 aa, ARTIFICIAL SEQUENCE
  Synthetic Construct
QKRR

SEQ ID NO: 2340 - protein, 4 aa, ARTIFICIAL SEQUENCE
  Synthetic Construct
QKRS

SEQ ID NO: 2341 - protein, 4 aa, ARTIFICIAL SEQUENCE
  Synthetic Construct
QKRT

SEQ ID NO: 2342 - protein, 4 aa, ARTIFICIAL SEQUENCE
  Synthetic Construct
QKRY

SEQ ID NO: 2343 - protein, 4 aa, ARTIFICIAL SEQUENCE
  Synthetic Construct
QKSA

SEQ ID NO: 2344 - protein, 4 aa, ARTIFICIAL SEQUENCE
  Synthetic Construct
QKSD

SEQ ID NO: 2345 - protein, 4 aa, ARTIFICIAL SEQUENCE
  Synthetic Construct
QKSE

SEQ ID NO: 2346 - protein, 4 aa, ARTIFICIAL SEQUENCE
  Synthetic Construct
QKSF

SEQ ID NO: 2347 - protein, 4 aa, ARTIFICIAL SEQUENCE
  Synthetic Construct
QKSG

SEQ ID NO: 2348 - protein, 4 aa, ARTIFICIAL SEQUENCE
  Synthetic Construct
QKSH

SEQ ID NO: 2349 - protein, 4 aa, ARTIFICIAL SEQUENCE
  Synthetic Construct
QKSI

SEQ ID NO: 2350 - protein, 4 aa, ARTIFICIAL SEQUENCE
  Synthetic Construct
QKSL

SEQ ID NO: 2351 - protein, 4 aa, ARTIFICIAL SEQUENCE
  Synthetic Construct
QKSN

SEQ ID NO: 2352 - protein, 4 aa, ARTIFICIAL SEQUENCE
  Synthetic Construct
QKSQ

SEQ ID NO: 2353 - protein, 4 aa, ARTIFICIAL SEQUENCE
  Synthetic Construct
QKSR

SEQ ID NO: 2354 - protein, 4 aa, ARTIFICIAL SEQUENCE
  Synthetic Construct
QKSS

SEQ ID NO: 2355 - protein, 4 aa, ARTIFICIAL SEQUENCE
  Synthetic Construct
QKST

SEQ ID NO: 2356 - protein, 4 aa, ARTIFICIAL SEQUENCE
  Synthetic Construct
QKSY

SEQ ID NO: 2357 - protein, 4 aa, ARTIFICIAL SEQUENCE
  Synthetic Construct
QKTA

SEQ ID NO: 2358 - protein, 4 aa, ARTIFICIAL SEQUENCE
  Synthetic Construct
QKTD

SEQ ID NO: 2359 - protein, 4 aa, ARTIFICIAL SEQUENCE
  Synthetic Construct
QKTE

SEQ ID NO: 2360 - protein, 4 aa, ARTIFICIAL SEQUENCE
  Synthetic Construct
QKTF

SEQ ID NO: 2361 - protein, 4 aa, ARTIFICIAL SEQUENCE
  Synthetic Construct
QKTG

SEQ ID NO: 2362 - protein, 4 aa, ARTIFICIAL SEQUENCE
  Synthetic Construct
QKTH

SEQ ID NO: 2363 - protein, 4 aa, ARTIFICIAL SEQUENCE
  Synthetic Construct
QKTI

SEQ ID NO: 2364 - protein, 4 aa, ARTIFICIAL SEQUENCE
  Synthetic Construct
QKTL

SEQ ID NO: 2365 - protein, 4 aa, ARTIFICIAL SEQUENCE
  Synthetic Construct
QKTN

SEQ ID NO: 2366 - protein, 4 aa, ARTIFICIAL SEQUENCE
  Synthetic Construct
QKTQ

SEQ ID NO: 2367 - protein, 4 aa, ARTIFICIAL SEQUENCE
  Synthetic Construct
QKTR

SEQ ID NO: 2368 - protein, 4 aa, ARTIFICIAL SEQUENCE
  Synthetic Construct
QKTS

SEQ ID NO: 2369 - protein, 4 aa, ARTIFICIAL SEQUENCE
  Synthetic Construct
QKTT

SEQ ID NO: 2370 - protein, 4 aa, ARTIFICIAL SEQUENCE
  Synthetic Construct
QKTY

SEQ ID NO: 2371 - protein, 4 aa, ARTIFICIAL SEQUENCE
  Synthetic Construct
QKYA

SEQ ID NO: 2372 - protein, 4 aa, ARTIFICIAL SEQUENCE
  Synthetic Construct
QKYD

SEQ ID NO: 2373 - protein, 4 aa, ARTIFICIAL SEQUENCE
  Synthetic Construct
QKYE

SEQ ID NO: 2374 - protein, 4 aa, ARTIFICIAL SEQUENCE
  Synthetic Construct
QKYF

SEQ ID NO: 2375 - protein, 4 aa, ARTIFICIAL SEQUENCE
  Synthetic Construct
QKYG

SEQ ID NO: 2376 - protein, 4 aa, ARTIFICIAL SEQUENCE
  Synthetic Construct
QKYH

SEQ ID NO: 2377 - protein, 4 aa, ARTIFICIAL SEQUENCE
  Synthetic Construct
QKYI

SEQ ID NO: 2378 - protein, 4 aa, ARTIFICIAL SEQUENCE
  Synthetic Construct
QKYL

SEQ ID NO: 2379 - protein, 4 aa, ARTIFICIAL SEQUENCE
  Synthetic Construct
QKYN

SEQ ID NO: 2380 - protein, 4 aa, ARTIFICIAL SEQUENCE
  Synthetic Construct
QKYQ

SEQ ID NO: 2381 - protein, 4 aa, ARTIFICIAL SEQUENCE
  Synthetic Construct
QKYR

SEQ ID NO: 2382 - protein, 4 aa, ARTIFICIAL SEQUENCE
  Synthetic Construct
QKYS

SEQ ID NO: 2383 - protein, 4 aa, ARTIFICIAL SEQUENCE
  Synthetic Construct
QKYT

SEQ ID NO: 2384 - protein, 4 aa, ARTIFICIAL SEQUENCE
  Synthetic Construct
QKYY

SEQ ID NO: 2385 - protein, 4 aa, ARTIFICIAL SEQUENCE
  Synthetic Construct
RKAA

SEQ ID NO: 2386 - protein, 4 aa, ARTIFICIAL SEQUENCE
  Synthetic Construct
RKAD

SEQ ID NO: 2387 - protein, 4 aa, ARTIFICIAL SEQUENCE
  Synthetic Construct
RKAE

SEQ ID NO: 2388 - protein, 4 aa, ARTIFICIAL SEQUENCE
  Synthetic Construct
RKAF

SEQ ID NO: 2389 - protein, 4 aa, ARTIFICIAL SEQUENCE
  Synthetic Construct
RKAG

SEQ ID NO: 2390 - protein, 4 aa, ARTIFICIAL SEQUENCE
  Synthetic Construct
RKAH

SEQ ID NO: 2391 - protein, 4 aa, ARTIFICIAL SEQUENCE
  Synthetic Construct
RKAI

SEQ ID NO: 2392 - protein, 4 aa, ARTIFICIAL SEQUENCE
  Synthetic Construct
RKAL

SEQ ID NO: 2393 - protein, 4 aa, ARTIFICIAL SEQUENCE
  Synthetic Construct
RKAN

SEQ ID NO: 2394 - protein, 4 aa, ARTIFICIAL SEQUENCE
  Synthetic Construct
RKAQ

SEQ ID NO: 2395 - protein, 4 aa, ARTIFICIAL SEQUENCE
  Synthetic Construct
RKAR

SEQ ID NO: 2396 - protein, 4 aa, ARTIFICIAL SEQUENCE
  Synthetic Construct
RKAS

SEQ ID NO: 2397 - protein, 4 aa, ARTIFICIAL SEQUENCE
  Synthetic Construct
RKAT

SEQ ID NO: 2398 - protein, 4 aa, ARTIFICIAL SEQUENCE
  Synthetic Construct
RKAY

SEQ ID NO: 2399 - protein, 4 aa, ARTIFICIAL SEQUENCE
  Synthetic Construct
RKDA

SEQ ID NO: 2400 - protein, 4 aa, ARTIFICIAL SEQUENCE
  Synthetic Construct
RKDD

SEQ ID NO: 2401 - protein, 4 aa, ARTIFICIAL SEQUENCE
  Synthetic Construct
RKDE

SEQ ID NO: 2402 - protein, 4 aa, ARTIFICIAL SEQUENCE
  Synthetic Construct
RKDF

SEQ ID NO: 2403 - protein, 4 aa, ARTIFICIAL SEQUENCE
  Synthetic Construct
RKDG

SEQ ID NO: 2404 - protein, 4 aa, ARTIFICIAL SEQUENCE
  Synthetic Construct
RKDH

SEQ ID NO: 2405 - protein, 4 aa, ARTIFICIAL SEQUENCE
  Synthetic Construct
RKDI

SEQ ID NO: 2406 - protein, 4 aa, ARTIFICIAL SEQUENCE
  Synthetic Construct
RKDL

SEQ ID NO: 2407 - protein, 4 aa, ARTIFICIAL SEQUENCE
  Synthetic Construct
RKDN

SEQ ID NO: 2408 - protein, 4 aa, ARTIFICIAL SEQUENCE
  Synthetic Construct
RKDQ

SEQ ID NO: 2409 - protein, 4 aa, ARTIFICIAL SEQUENCE
  Synthetic Construct
RKDR

SEQ ID NO: 2410 - protein, 4 aa, ARTIFICIAL SEQUENCE
  Synthetic Construct
RKDS

SEQ ID NO: 2411 - protein, 4 aa, ARTIFICIAL SEQUENCE
  Synthetic Construct
RKDT

SEQ ID NO: 2412 - protein, 4 aa, ARTIFICIAL SEQUENCE
  Synthetic Construct
RKDY

SEQ ID NO: 2413 - protein, 4 aa, ARTIFICIAL SEQUENCE
  Synthetic Construct
RKEA

SEQ ID NO: 2414 - protein, 4 aa, ARTIFICIAL SEQUENCE
  Synthetic Construct
RKED

SEQ ID NO: 2415 - protein, 4 aa, ARTIFICIAL SEQUENCE
  Synthetic Construct
RKEE

SEQ ID NO: 2416 - protein, 4 aa, ARTIFICIAL SEQUENCE
  Synthetic Construct
RKEF

SEQ ID NO: 2417 - protein, 4 aa, ARTIFICIAL SEQUENCE
  Synthetic Construct
RKEG

SEQ ID NO: 2418 - protein, 4 aa, ARTIFICIAL SEQUENCE
  Synthetic Construct
RKEH

SEQ ID NO: 2419 - protein, 4 aa, ARTIFICIAL SEQUENCE
  Synthetic Construct
RKEI

SEQ ID NO: 2420 - protein, 4 aa, ARTIFICIAL SEQUENCE
  Synthetic Construct
RKEL

SEQ ID NO: 2421 - protein, 4 aa, ARTIFICIAL SEQUENCE
  Synthetic Construct
RKEN

SEQ ID NO: 2422 - protein, 4 aa, ARTIFICIAL SEQUENCE
  Synthetic Construct
RKEQ

SEQ ID NO: 2423 - protein, 4 aa, ARTIFICIAL SEQUENCE
  Synthetic Construct
RKER

SEQ ID NO: 2424 - protein, 4 aa, ARTIFICIAL SEQUENCE
  Synthetic Construct
RKES

SEQ ID NO: 2425 - protein, 4 aa, ARTIFICIAL SEQUENCE
  Synthetic Construct
RKET

SEQ ID NO: 2426 - protein, 4 aa, ARTIFICIAL SEQUENCE
  Synthetic Construct
RKEY

SEQ ID NO: 2427 - protein, 4 aa, ARTIFICIAL SEQUENCE
  Synthetic Construct
RKFA

SEQ ID NO: 2428 - protein, 4 aa, ARTIFICIAL SEQUENCE
  Synthetic Construct
RKFD

SEQ ID NO: 2429 - protein, 4 aa, ARTIFICIAL SEQUENCE
  Synthetic Construct
RKFE

SEQ ID NO: 2430 - protein, 4 aa, ARTIFICIAL SEQUENCE
  Synthetic Construct
RKFF

SEQ ID NO: 2431 - protein, 4 aa, ARTIFICIAL SEQUENCE
  Synthetic Construct
RKFG

SEQ ID NO: 2432 - protein, 4 aa, ARTIFICIAL SEQUENCE
  Synthetic Construct
RKFH

SEQ ID NO: 2433 - protein, 4 aa, ARTIFICIAL SEQUENCE
  Synthetic Construct
RKFI

SEQ ID NO: 2434 - protein, 4 aa, ARTIFICIAL SEQUENCE
  Synthetic Construct
RKFL

SEQ ID NO: 2435 - protein, 4 aa, ARTIFICIAL SEQUENCE
  Synthetic Construct
RKFN

SEQ ID NO: 2436 - protein, 4 aa, ARTIFICIAL SEQUENCE
  Synthetic Construct
RKFQ

SEQ ID NO: 2437 - protein, 4 aa, ARTIFICIAL SEQUENCE
  Synthetic Construct
RKFR

SEQ ID NO: 2438 - protein, 4 aa, ARTIFICIAL SEQUENCE
  Synthetic Construct
RKFS

SEQ ID NO: 2439 - protein, 4 aa, ARTIFICIAL SEQUENCE
  Synthetic Construct
RKFT

SEQ ID NO: 2440 - protein, 4 aa, ARTIFICIAL SEQUENCE
  Synthetic Construct
RKFY

SEQ ID NO: 2441 - protein, 4 aa, ARTIFICIAL SEQUENCE
  Synthetic Construct
RKGA

SEQ ID NO: 2442 - protein, 4 aa, ARTIFICIAL SEQUENCE
  Synthetic Construct
RKGD

SEQ ID NO: 2443 - protein, 4 aa, ARTIFICIAL SEQUENCE
  Synthetic Construct
RKGE

SEQ ID NO: 2444 - protein, 4 aa, ARTIFICIAL SEQUENCE
  Synthetic Construct
RKGF

SEQ ID NO: 2445 - protein, 4 aa, ARTIFICIAL SEQUENCE
  Synthetic Construct
RKGG

SEQ ID NO: 2446 - protein, 4 aa, ARTIFICIAL SEQUENCE
  Synthetic Construct
RKGH

SEQ ID NO: 2447 - protein, 4 aa, ARTIFICIAL SEQUENCE
  Synthetic Construct
RKGI

SEQ ID NO: 2448 - protein, 4 aa, ARTIFICIAL SEQUENCE
  Synthetic Construct
RKGL

SEQ ID NO: 2449 - protein, 4 aa, ARTIFICIAL SEQUENCE
  Synthetic Construct
RKGN

SEQ ID NO: 2450 - protein, 4 aa, ARTIFICIAL SEQUENCE
  Synthetic Construct
RKGQ

SEQ ID NO: 2451 - protein, 4 aa, ARTIFICIAL SEQUENCE
  Synthetic Construct
RKGR

SEQ ID NO: 2452 - protein, 4 aa, ARTIFICIAL SEQUENCE
  Synthetic Construct
RKGS

SEQ ID NO: 2453 - protein, 4 aa, ARTIFICIAL SEQUENCE
  Synthetic Construct
RKGT

SEQ ID NO: 2454 - protein, 4 aa, ARTIFICIAL SEQUENCE
  Synthetic Construct
RKGY

SEQ ID NO: 2455 - protein, 4 aa, ARTIFICIAL SEQUENCE
  Synthetic Construct
RKHA

SEQ ID NO: 2456 - protein, 4 aa, ARTIFICIAL SEQUENCE
  Synthetic Construct
RKHD

SEQ ID NO: 2457 - protein, 4 aa, ARTIFICIAL SEQUENCE
  Synthetic Construct
RKHE

SEQ ID NO: 2458 - protein, 4 aa, ARTIFICIAL SEQUENCE
  Synthetic Construct
RKHF

SEQ ID NO: 2459 - protein, 4 aa, ARTIFICIAL SEQUENCE
  Synthetic Construct
RKHG

SEQ ID NO: 2460 - protein, 4 aa, ARTIFICIAL SEQUENCE
  Synthetic Construct
RKHH

SEQ ID NO: 2461 - protein, 4 aa, ARTIFICIAL SEQUENCE
  Synthetic Construct
RKHI

SEQ ID NO: 2462 - protein, 4 aa, ARTIFICIAL SEQUENCE
  Synthetic Construct
RKHL

SEQ ID NO: 2463 - protein, 4 aa, ARTIFICIAL SEQUENCE
  Synthetic Construct
RKHN

SEQ ID NO: 2464 - protein, 4 aa, ARTIFICIAL SEQUENCE
  Synthetic Construct
RKHQ

SEQ ID NO: 2465 - protein, 4 aa, ARTIFICIAL SEQUENCE
  Synthetic Construct
RKHR

SEQ ID NO: 2466 - protein, 4 aa, ARTIFICIAL SEQUENCE
  Synthetic Construct
RKHS

SEQ ID NO: 2467 - protein, 4 aa, ARTIFICIAL SEQUENCE
  Synthetic Construct
RKHT

SEQ ID NO: 2468 - protein, 4 aa, ARTIFICIAL SEQUENCE
  Synthetic Construct
RKHY

SEQ ID NO: 2469 - protein, 4 aa, ARTIFICIAL SEQUENCE
  Synthetic Construct
RKIA

SEQ ID NO: 2470 - protein, 4 aa, ARTIFICIAL SEQUENCE
  Synthetic Construct
RKID

SEQ ID NO: 2471 - protein, 4 aa, ARTIFICIAL SEQUENCE
  Synthetic Construct
RKIE

SEQ ID NO: 2472 - protein, 4 aa, ARTIFICIAL SEQUENCE
  Synthetic Construct
RKIF

SEQ ID NO: 2473 - protein, 4 aa, ARTIFICIAL SEQUENCE
  Synthetic Construct
RKIG

SEQ ID NO: 2474 - protein, 4 aa, ARTIFICIAL SEQUENCE
  Synthetic Construct
RKIH

SEQ ID NO: 2475 - protein, 4 aa, ARTIFICIAL SEQUENCE
  Synthetic Construct
RKII

SEQ ID NO: 2476 - protein, 4 aa, ARTIFICIAL SEQUENCE
  Synthetic Construct
RKIL

SEQ ID NO: 2477 - protein, 4 aa, ARTIFICIAL SEQUENCE
  Synthetic Construct
RKIN

SEQ ID NO: 2478 - protein, 4 aa, ARTIFICIAL SEQUENCE
  Synthetic Construct
RKIQ

SEQ ID NO: 2479 - protein, 4 aa, ARTIFICIAL SEQUENCE
  Synthetic Construct
RKIR

SEQ ID NO: 2480 - protein, 4 aa, ARTIFICIAL SEQUENCE
  Synthetic Construct
RKIS

SEQ ID NO: 2481 - protein, 4 aa, ARTIFICIAL SEQUENCE
  Synthetic Construct
RKIT

SEQ ID NO: 2482 - protein, 4 aa, ARTIFICIAL SEQUENCE
  Synthetic Construct
RKIY

SEQ ID NO: 2483 - protein, 4 aa, ARTIFICIAL SEQUENCE
  Synthetic Construct
RKLA

SEQ ID NO: 2484 - protein, 4 aa, ARTIFICIAL SEQUENCE
  Synthetic Construct
RKLD

SEQ ID NO: 2485 - protein, 4 aa, ARTIFICIAL SEQUENCE
  Synthetic Construct
RKLE

SEQ ID NO: 2486 - protein, 4 aa, ARTIFICIAL SEQUENCE
  Synthetic Construct
RKLF

SEQ ID NO: 2487 - protein, 4 aa, ARTIFICIAL SEQUENCE
  Synthetic Construct
RKLG

SEQ ID NO: 2488 - protein, 4 aa, ARTIFICIAL SEQUENCE
  Synthetic Construct
RKLH

SEQ ID NO: 2489 - protein, 4 aa, ARTIFICIAL SEQUENCE
  Synthetic Construct
RKLI

SEQ ID NO: 2490 - protein, 4 aa, ARTIFICIAL SEQUENCE
  Synthetic Construct
RKLL

SEQ ID NO: 2491 - protein, 4 aa, ARTIFICIAL SEQUENCE
  Synthetic Construct
RKLN

SEQ ID NO: 2492 - protein, 4 aa, ARTIFICIAL SEQUENCE
  Synthetic Construct
RKLQ

SEQ ID NO: 2493 - protein, 4 aa, ARTIFICIAL SEQUENCE
  Synthetic Construct
RKLR

SEQ ID NO: 2494 - protein, 4 aa, ARTIFICIAL SEQUENCE
  Synthetic Construct
RKLS

SEQ ID NO: 2495 - protein, 4 aa, ARTIFICIAL SEQUENCE
  Synthetic Construct
RKLT

SEQ ID NO: 2496 - protein, 4 aa, ARTIFICIAL SEQUENCE
  Synthetic Construct
RKLY

SEQ ID NO: 2497 - protein, 4 aa, ARTIFICIAL SEQUENCE
  Synthetic Construct
RKNA

SEQ ID NO: 2498 - protein, 4 aa, ARTIFICIAL SEQUENCE
  Synthetic Construct
RKND

SEQ ID NO: 2499 - protein, 4 aa, ARTIFICIAL SEQUENCE
  Synthetic Construct
RKNE

SEQ ID NO: 2500 - protein, 4 aa, ARTIFICIAL SEQUENCE
  Synthetic Construct
RKNF

SEQ ID NO: 2501 - protein, 4 aa, ARTIFICIAL SEQUENCE
  Synthetic Construct
RKNG

SEQ ID NO: 2502 - protein, 4 aa, ARTIFICIAL SEQUENCE
  Synthetic Construct
RKNH

SEQ ID NO: 2503 - protein, 4 aa, ARTIFICIAL SEQUENCE
  Synthetic Construct
RKNI

SEQ ID NO: 2504 - protein, 4 aa, ARTIFICIAL SEQUENCE
  Synthetic Construct
RKNL

SEQ ID NO: 2505 - protein, 4 aa, ARTIFICIAL SEQUENCE
  Synthetic Construct
RKNN

SEQ ID NO: 2506 - protein, 4 aa, ARTIFICIAL SEQUENCE
  Synthetic Construct
RKNQ

SEQ ID NO: 2507 - protein, 4 aa, ARTIFICIAL SEQUENCE
  Synthetic Construct
RKNR

SEQ ID NO: 2508 - protein, 4 aa, ARTIFICIAL SEQUENCE
  Synthetic Construct
RKNS

SEQ ID NO: 2509 - protein, 4 aa, ARTIFICIAL SEQUENCE
  Synthetic Construct
RKNT

SEQ ID NO: 2510 - protein, 4 aa, ARTIFICIAL SEQUENCE
  Synthetic Construct
RKNY

SEQ ID NO: 2511 - protein, 4 aa, ARTIFICIAL SEQUENCE
  Synthetic Construct
RKPA

SEQ ID NO: 2512 - protein, 4 aa, ARTIFICIAL SEQUENCE
  Synthetic Construct
RKPD

SEQ ID NO: 2513 - protein, 4 aa, ARTIFICIAL SEQUENCE
  Synthetic Construct
RKPE

SEQ ID NO: 2514 - protein, 4 aa, ARTIFICIAL SEQUENCE
  Synthetic Construct
RKPF

SEQ ID NO: 2515 - protein, 4 aa, ARTIFICIAL SEQUENCE
  Synthetic Construct
RKPG

SEQ ID NO: 2516 - protein, 4 aa, ARTIFICIAL SEQUENCE
  Synthetic Construct
RKPH

SEQ ID NO: 2517 - protein, 4 aa, ARTIFICIAL SEQUENCE
  Synthetic Construct
RKPI

SEQ ID NO: 2518 - protein, 4 aa, ARTIFICIAL SEQUENCE
  Synthetic Construct
RKPL

SEQ ID NO: 2519 - protein, 4 aa, ARTIFICIAL SEQUENCE
  Synthetic Construct
RKPN

SEQ ID NO: 2520 - protein, 4 aa, ARTIFICIAL SEQUENCE
  Synthetic Construct
RKPQ

SEQ ID NO: 2521 - protein, 4 aa, ARTIFICIAL SEQUENCE
  Synthetic Construct
RKPR

SEQ ID NO: 2522 - protein, 4 aa, ARTIFICIAL SEQUENCE
  Synthetic Construct
RKPS

SEQ ID NO: 2523 - protein, 4 aa, ARTIFICIAL SEQUENCE
  Synthetic Construct
RKPT

SEQ ID NO: 2524 - protein, 4 aa, ARTIFICIAL SEQUENCE
  Synthetic Construct
RKPY

SEQ ID NO: 2525 - protein, 4 aa, ARTIFICIAL SEQUENCE
  Synthetic Construct
RKQA

SEQ ID NO: 2526 - protein, 4 aa, ARTIFICIAL SEQUENCE
  Synthetic Construct
RKQD

SEQ ID NO: 2527 - protein, 4 aa, ARTIFICIAL SEQUENCE
  Synthetic Construct
RKQE

SEQ ID NO: 2528 - protein, 4 aa, ARTIFICIAL SEQUENCE
  Synthetic Construct
RKQF

SEQ ID NO: 2529 - protein, 4 aa, ARTIFICIAL SEQUENCE
  Synthetic Construct
RKQG

SEQ ID NO: 2530 - protein, 4 aa, ARTIFICIAL SEQUENCE
  Synthetic Construct
RKQH

SEQ ID NO: 2531 - protein, 4 aa, ARTIFICIAL SEQUENCE
  Synthetic Construct
RKQI

SEQ ID NO: 2532 - protein, 4 aa, ARTIFICIAL SEQUENCE
  Synthetic Construct
RKQL

SEQ ID NO: 2533 - protein, 4 aa, ARTIFICIAL SEQUENCE
  Synthetic Construct
RKQN

SEQ ID NO: 2534 - protein, 4 aa, ARTIFICIAL SEQUENCE
  Synthetic Construct
RKQQ

SEQ ID NO: 2535 - protein, 4 aa, ARTIFICIAL SEQUENCE
  Synthetic Construct
RKQR

SEQ ID NO: 2536 - protein, 4 aa, ARTIFICIAL SEQUENCE
  Synthetic Construct
RKQS

SEQ ID NO: 2537 - protein, 4 aa, ARTIFICIAL SEQUENCE
  Synthetic Construct
RKQT

SEQ ID NO: 2538 - protein, 4 aa, ARTIFICIAL SEQUENCE
  Synthetic Construct
RKQY

SEQ ID NO: 2539 - protein, 4 aa, ARTIFICIAL SEQUENCE
  Synthetic Construct
RKRA

SEQ ID NO: 2540 - protein, 4 aa, ARTIFICIAL SEQUENCE
  Synthetic Construct
RKRD

SEQ ID NO: 2541 - protein, 4 aa, ARTIFICIAL SEQUENCE
  Synthetic Construct
RKRE

SEQ ID NO: 2542 - protein, 4 aa, ARTIFICIAL SEQUENCE
  Synthetic Construct
RKRF

SEQ ID NO: 2543 - protein, 4 aa, ARTIFICIAL SEQUENCE
  Synthetic Construct
RKRG

SEQ ID NO: 2544 - protein, 4 aa, ARTIFICIAL SEQUENCE
  Synthetic Construct
RKRH

SEQ ID NO: 2545 - protein, 4 aa, ARTIFICIAL SEQUENCE
  Synthetic Construct
RKRI

SEQ ID NO: 2546 - protein, 4 aa, ARTIFICIAL SEQUENCE
  Synthetic Construct
RKRL

SEQ ID NO: 2547 - protein, 4 aa, ARTIFICIAL SEQUENCE
  Synthetic Construct
RKRN

SEQ ID NO: 2548 - protein, 4 aa, ARTIFICIAL SEQUENCE
  Synthetic Construct
RKRQ

SEQ ID NO: 2549 - protein, 4 aa, ARTIFICIAL SEQUENCE
  Synthetic Construct
RKRR

SEQ ID NO: 2550 - protein, 4 aa, ARTIFICIAL SEQUENCE
  Synthetic Construct
RKRS

SEQ ID NO: 2551 - protein, 4 aa, ARTIFICIAL SEQUENCE
  Synthetic Construct
RKRT

SEQ ID NO: 2552 - protein, 4 aa, ARTIFICIAL SEQUENCE
  Synthetic Construct
RKRY

SEQ ID NO: 2553 - protein, 4 aa, ARTIFICIAL SEQUENCE
  Synthetic Construct
RKSA

SEQ ID NO: 2554 - protein, 4 aa, ARTIFICIAL SEQUENCE
  Synthetic Construct
RKSD

SEQ ID NO: 2555 - protein, 4 aa, ARTIFICIAL SEQUENCE
  Synthetic Construct
RKSE

SEQ ID NO: 2556 - protein, 4 aa, ARTIFICIAL SEQUENCE
  Synthetic Construct
RKSF

SEQ ID NO: 2557 - protein, 4 aa, ARTIFICIAL SEQUENCE
  Synthetic Construct
RKSG

SEQ ID NO: 2558 - protein, 4 aa, ARTIFICIAL SEQUENCE
  Synthetic Construct
RKSH

SEQ ID NO: 2559 - protein, 4 aa, ARTIFICIAL SEQUENCE
  Synthetic Construct
RKSI

SEQ ID NO: 2560 - protein, 4 aa, ARTIFICIAL SEQUENCE
  Synthetic Construct
RKSL

SEQ ID NO: 2561 - protein, 4 aa, ARTIFICIAL SEQUENCE
  Synthetic Construct
RKSN

SEQ ID NO: 2562 - protein, 4 aa, ARTIFICIAL SEQUENCE
  Synthetic Construct
RKSQ

SEQ ID NO: 2563 - protein, 4 aa, ARTIFICIAL SEQUENCE
  Synthetic Construct
RKSR

SEQ ID NO: 2564 - protein, 4 aa, ARTIFICIAL SEQUENCE
  Synthetic Construct
RKSS

SEQ ID NO: 2565 - protein, 4 aa, ARTIFICIAL SEQUENCE
  Synthetic Construct
RKST

SEQ ID NO: 2566 - protein, 4 aa, ARTIFICIAL SEQUENCE
  Synthetic Construct
RKSY

SEQ ID NO: 2567 - protein, 4 aa, ARTIFICIAL SEQUENCE
  Synthetic Construct
RKTA

SEQ ID NO: 2568 - protein, 4 aa, ARTIFICIAL SEQUENCE
  Synthetic Construct
RKTD

SEQ ID NO: 2569 - protein, 4 aa, ARTIFICIAL SEQUENCE
  Synthetic Construct
RKTE

SEQ ID NO: 2570 - protein, 4 aa, ARTIFICIAL SEQUENCE
  Synthetic Construct
RKTF

SEQ ID NO: 2571 - protein, 4 aa, ARTIFICIAL SEQUENCE
  Synthetic Construct
RKTG

SEQ ID NO: 2572 - protein, 4 aa, ARTIFICIAL SEQUENCE
  Synthetic Construct
RKTH

SEQ ID NO: 2573 - protein, 4 aa, ARTIFICIAL SEQUENCE
  Synthetic Construct
RKTI

SEQ ID NO: 2574 - protein, 4 aa, ARTIFICIAL SEQUENCE
  Synthetic Construct
RKTL

SEQ ID NO: 2575 - protein, 4 aa, ARTIFICIAL SEQUENCE
  Synthetic Construct
RKTN

SEQ ID NO: 2576 - protein, 4 aa, ARTIFICIAL SEQUENCE
  Synthetic Construct
RKTQ

SEQ ID NO: 2577 - protein, 4 aa, ARTIFICIAL SEQUENCE
  Synthetic Construct
RKTR

SEQ ID NO: 2578 - protein, 4 aa, ARTIFICIAL SEQUENCE
  Synthetic Construct
RKTS

SEQ ID NO: 2579 - protein, 4 aa, ARTIFICIAL SEQUENCE
  Synthetic Construct
RKTT

SEQ ID NO: 2580 - protein, 4 aa, ARTIFICIAL SEQUENCE
  Synthetic Construct
RKTY

SEQ ID NO: 2581 - protein, 4 aa, ARTIFICIAL SEQUENCE
  Synthetic Construct
RKYA

SEQ ID NO: 2582 - protein, 4 aa, ARTIFICIAL SEQUENCE
  Synthetic Construct
RKYD

SEQ ID NO: 2583 - protein, 4 aa, ARTIFICIAL SEQUENCE
  Synthetic Construct
RKYE

SEQ ID NO: 2584 - protein, 4 aa, ARTIFICIAL SEQUENCE
  Synthetic Construct
RKYF

SEQ ID NO: 2585 - protein, 4 aa, ARTIFICIAL SEQUENCE
  Synthetic Construct
RKYG

SEQ ID NO: 2586 - protein, 4 aa, ARTIFICIAL SEQUENCE
  Synthetic Construct
RKYH

SEQ ID NO: 2587 - protein, 4 aa, ARTIFICIAL SEQUENCE
  Synthetic Construct
RKYI

SEQ ID NO: 2588 - protein, 4 aa, ARTIFICIAL SEQUENCE
  Synthetic Construct
RKYL

SEQ ID NO: 2589 - protein, 4 aa, ARTIFICIAL SEQUENCE
  Synthetic Construct
RKYN

SEQ ID NO: 2590 - protein, 4 aa, ARTIFICIAL SEQUENCE
  Synthetic Construct
RKYQ

SEQ ID NO: 2591 - protein, 4 aa, ARTIFICIAL SEQUENCE
  Synthetic Construct
RKYR

SEQ ID NO: 2592 - protein, 4 aa, ARTIFICIAL SEQUENCE
  Synthetic Construct
RKYS

SEQ ID NO: 2593 - protein, 4 aa, ARTIFICIAL SEQUENCE
  Synthetic Construct
RKYT

SEQ ID NO: 2594 - protein, 4 aa, ARTIFICIAL SEQUENCE
  Synthetic Construct
RKYY

SEQ ID NO: 2595 - protein, 4 aa, ARTIFICIAL SEQUENCE
  Synthetic Construct
SKAA

SEQ ID NO: 2596 - protein, 4 aa, ARTIFICIAL SEQUENCE
  Synthetic Construct
SKAD

SEQ ID NO: 2597 - protein, 4 aa, ARTIFICIAL SEQUENCE
  Synthetic Construct
SKAE

SEQ ID NO: 2598 - protein, 4 aa, ARTIFICIAL SEQUENCE
  Synthetic Construct
SKAF

SEQ ID NO: 2599 - protein, 4 aa, ARTIFICIAL SEQUENCE
  Synthetic Construct
SKAG

SEQ ID NO: 2600 - protein, 4 aa, ARTIFICIAL SEQUENCE
  Synthetic Construct
SKAH

SEQ ID NO: 2601 - protein, 4 aa, ARTIFICIAL SEQUENCE
  Synthetic Construct
SKAI

SEQ ID NO: 2602 - protein, 4 aa, ARTIFICIAL SEQUENCE
  Synthetic Construct
SKAL

SEQ ID NO: 2603 - protein, 4 aa, ARTIFICIAL SEQUENCE
  Synthetic Construct
SKAN

SEQ ID NO: 2604 - protein, 4 aa, ARTIFICIAL SEQUENCE
  Synthetic Construct
SKAQ

SEQ ID NO: 2605 - protein, 4 aa, ARTIFICIAL SEQUENCE
  Synthetic Construct
SKAR

SEQ ID NO: 2606 - protein, 4 aa, ARTIFICIAL SEQUENCE
  Synthetic Construct
SKAS

SEQ ID NO: 2607 - protein, 4 aa, ARTIFICIAL SEQUENCE
  Synthetic Construct
SKAT

SEQ ID NO: 2608 - protein, 4 aa, ARTIFICIAL SEQUENCE
  Synthetic Construct
SKAY

SEQ ID NO: 2609 - protein, 4 aa, ARTIFICIAL SEQUENCE
  Synthetic Construct
SKDA

SEQ ID NO: 2610 - protein, 4 aa, ARTIFICIAL SEQUENCE
  Synthetic Construct
SKDD

SEQ ID NO: 2611 - protein, 4 aa, ARTIFICIAL SEQUENCE
  Synthetic Construct
SKDE

SEQ ID NO: 2612 - protein, 4 aa, ARTIFICIAL SEQUENCE
  Synthetic Construct
SKDF

SEQ ID NO: 2613 - protein, 4 aa, ARTIFICIAL SEQUENCE
  Synthetic Construct
SKDG

SEQ ID NO: 2614 - protein, 4 aa, ARTIFICIAL SEQUENCE
  Synthetic Construct
SKDH

SEQ ID NO: 2615 - protein, 4 aa, ARTIFICIAL SEQUENCE
  Synthetic Construct
SKDI

SEQ ID NO: 2616 - protein, 4 aa, ARTIFICIAL SEQUENCE
  Synthetic Construct
SKDL

SEQ ID NO: 2617 - protein, 4 aa, ARTIFICIAL SEQUENCE
  Synthetic Construct
SKDN

SEQ ID NO: 2618 - protein, 4 aa, ARTIFICIAL SEQUENCE
  Synthetic Construct
SKDQ

SEQ ID NO: 2619 - protein, 4 aa, ARTIFICIAL SEQUENCE
  Synthetic Construct
SKDR

SEQ ID NO: 2620 - protein, 4 aa, ARTIFICIAL SEQUENCE
  Synthetic Construct
SKDS

SEQ ID NO: 2621 - protein, 4 aa, ARTIFICIAL SEQUENCE
  Synthetic Construct
SKDT

SEQ ID NO: 2622 - protein, 4 aa, ARTIFICIAL SEQUENCE
  Synthetic Construct
SKDY

SEQ ID NO: 2623 - protein, 4 aa, ARTIFICIAL SEQUENCE
  Synthetic Construct
SKEA

SEQ ID NO: 2624 - protein, 4 aa, ARTIFICIAL SEQUENCE
  Synthetic Construct
SKED

SEQ ID NO: 2625 - protein, 4 aa, ARTIFICIAL SEQUENCE
  Synthetic Construct
SKEE

SEQ ID NO: 2626 - protein, 4 aa, ARTIFICIAL SEQUENCE
  Synthetic Construct
SKEF

SEQ ID NO: 2627 - protein, 4 aa, ARTIFICIAL SEQUENCE
  Synthetic Construct
SKEG

SEQ ID NO: 2628 - protein, 4 aa, ARTIFICIAL SEQUENCE
  Synthetic Construct
SKEH

SEQ ID NO: 2629 - protein, 4 aa, ARTIFICIAL SEQUENCE
  Synthetic Construct
SKEI

SEQ ID NO: 2630 - protein, 4 aa, ARTIFICIAL SEQUENCE
  Synthetic Construct
SKEL

SEQ ID NO: 2631 - protein, 4 aa, ARTIFICIAL SEQUENCE
  Synthetic Construct
SKEN

SEQ ID NO: 2632 - protein, 4 aa, ARTIFICIAL SEQUENCE
  Synthetic Construct
SKEQ

SEQ ID NO: 2633 - protein, 4 aa, ARTIFICIAL SEQUENCE
  Synthetic Construct
SKER

SEQ ID NO: 2634 - protein, 4 aa, ARTIFICIAL SEQUENCE
  Synthetic Construct
SKES

SEQ ID NO: 2635 - protein, 4 aa, ARTIFICIAL SEQUENCE
  Synthetic Construct
SKET

SEQ ID NO: 2636 - protein, 4 aa, ARTIFICIAL SEQUENCE
  Synthetic Construct
SKEY

SEQ ID NO: 2637 - protein, 4 aa, ARTIFICIAL SEQUENCE
  Synthetic Construct
SKFA

SEQ ID NO: 2638 - protein, 4 aa, ARTIFICIAL SEQUENCE
  Synthetic Construct
SKFD

SEQ ID NO: 2639 - protein, 4 aa, ARTIFICIAL SEQUENCE
  Synthetic Construct
SKFE

SEQ ID NO: 2640 - protein, 4 aa, ARTIFICIAL SEQUENCE
  Synthetic Construct
SKFF

SEQ ID NO: 2641 - protein, 4 aa, ARTIFICIAL SEQUENCE
  Synthetic Construct
SKFG

SEQ ID NO: 2642 - protein, 4 aa, ARTIFICIAL SEQUENCE
  Synthetic Construct
SKFH

SEQ ID NO: 2643 - protein, 4 aa, ARTIFICIAL SEQUENCE
  Synthetic Construct
SKFI

SEQ ID NO: 2644 - protein, 4 aa, ARTIFICIAL SEQUENCE
  Synthetic Construct
SKFL

SEQ ID NO: 2645 - protein, 4 aa, ARTIFICIAL SEQUENCE
  Synthetic Construct
SKFN

SEQ ID NO: 2646 - protein, 4 aa, ARTIFICIAL SEQUENCE
  Synthetic Construct
SKFQ

SEQ ID NO: 2647 - protein, 4 aa, ARTIFICIAL SEQUENCE
  Synthetic Construct
SKFR

SEQ ID NO: 2648 - protein, 4 aa, ARTIFICIAL SEQUENCE
  Synthetic Construct
SKFS

SEQ ID NO: 2649 - protein, 4 aa, ARTIFICIAL SEQUENCE
  Synthetic Construct
SKFT

SEQ ID NO: 2650 - protein, 4 aa, ARTIFICIAL SEQUENCE
  Synthetic Construct
SKFY

SEQ ID NO: 2651 - protein, 4 aa, ARTIFICIAL SEQUENCE
  Synthetic Construct
SKGA

SEQ ID NO: 2652 - protein, 4 aa, ARTIFICIAL SEQUENCE
  Synthetic Construct
SKGD

SEQ ID NO: 2653 - protein, 4 aa, ARTIFICIAL SEQUENCE
  Synthetic Construct
SKGE

SEQ ID NO: 2654 - protein, 4 aa, ARTIFICIAL SEQUENCE
  Synthetic Construct
SKGF

SEQ ID NO: 2655 - protein, 4 aa, ARTIFICIAL SEQUENCE
  Synthetic Construct
SKGG

SEQ ID NO: 2656 - protein, 4 aa, ARTIFICIAL SEQUENCE
  Synthetic Construct
SKGH

SEQ ID NO: 2657 - protein, 4 aa, ARTIFICIAL SEQUENCE
  Synthetic Construct
SKGI

SEQ ID NO: 2658 - protein, 4 aa, ARTIFICIAL SEQUENCE
  Synthetic Construct
SKGL

SEQ ID NO: 2659 - protein, 4 aa, ARTIFICIAL SEQUENCE
  Synthetic Construct
SKGN

SEQ ID NO: 2660 - protein, 4 aa, ARTIFICIAL SEQUENCE
  Synthetic Construct
SKGQ

SEQ ID NO: 2661 - protein, 4 aa, ARTIFICIAL SEQUENCE
  Synthetic Construct
SKGR

SEQ ID NO: 2662 - protein, 4 aa, ARTIFICIAL SEQUENCE
  Synthetic Construct
SKGS

SEQ ID NO: 2663 - protein, 4 aa, ARTIFICIAL SEQUENCE
  Synthetic Construct
SKGT

SEQ ID NO: 2664 - protein, 4 aa, ARTIFICIAL SEQUENCE
  Synthetic Construct
SKGY

SEQ ID NO: 2665 - protein, 4 aa, ARTIFICIAL SEQUENCE
  Synthetic Construct
SKHA

SEQ ID NO: 2666 - protein, 4 aa, ARTIFICIAL SEQUENCE
  Synthetic Construct
SKHD

SEQ ID NO: 2667 - protein, 4 aa, ARTIFICIAL SEQUENCE
  Synthetic Construct
SKHE

SEQ ID NO: 2668 - protein, 4 aa, ARTIFICIAL SEQUENCE
  Synthetic Construct
SKHF

SEQ ID NO: 2669 - protein, 4 aa, ARTIFICIAL SEQUENCE
  Synthetic Construct
SKHG

SEQ ID NO: 2670 - protein, 4 aa, ARTIFICIAL SEQUENCE
  Synthetic Construct
SKHH

SEQ ID NO: 2671 - protein, 4 aa, ARTIFICIAL SEQUENCE
  Synthetic Construct
SKHI

SEQ ID NO: 2672 - protein, 4 aa, ARTIFICIAL SEQUENCE
  Synthetic Construct
SKHL

SEQ ID NO: 2673 - protein, 4 aa, ARTIFICIAL SEQUENCE
  Synthetic Construct
SKHN

SEQ ID NO: 2674 - protein, 4 aa, ARTIFICIAL SEQUENCE
  Synthetic Construct
SKHQ

SEQ ID NO: 2675 - protein, 4 aa, ARTIFICIAL SEQUENCE
  Synthetic Construct
SKHR

SEQ ID NO: 2676 - protein, 4 aa, ARTIFICIAL SEQUENCE
  Synthetic Construct
SKHS

SEQ ID NO: 2677 - protein, 4 aa, ARTIFICIAL SEQUENCE
  Synthetic Construct
SKHT

SEQ ID NO: 2678 - protein, 4 aa, ARTIFICIAL SEQUENCE
  Synthetic Construct
SKHY

SEQ ID NO: 2679 - protein, 4 aa, ARTIFICIAL SEQUENCE
  Synthetic Construct
SKIA

SEQ ID NO: 2680 - protein, 4 aa, ARTIFICIAL SEQUENCE
  Synthetic Construct
SKID

SEQ ID NO: 2681 - protein, 4 aa, ARTIFICIAL SEQUENCE
  Synthetic Construct
SKIE

SEQ ID NO: 2682 - protein, 4 aa, ARTIFICIAL SEQUENCE
  Synthetic Construct
SKIF

SEQ ID NO: 2683 - protein, 4 aa, ARTIFICIAL SEQUENCE
  Synthetic Construct
SKIG

SEQ ID NO: 2684 - protein, 4 aa, ARTIFICIAL SEQUENCE
  Synthetic Construct
SKIH

SEQ ID NO: 2685 - protein, 4 aa, ARTIFICIAL SEQUENCE
  Synthetic Construct
SKII

SEQ ID NO: 2686 - protein, 4 aa, ARTIFICIAL SEQUENCE
  Synthetic Construct
SKIL

SEQ ID NO: 2687 - protein, 4 aa, ARTIFICIAL SEQUENCE
  Synthetic Construct
SKIN

SEQ ID NO: 2688 - protein, 4 aa, ARTIFICIAL SEQUENCE
  Synthetic Construct
SKIQ

SEQ ID NO: 2689 - protein, 4 aa, ARTIFICIAL SEQUENCE
  Synthetic Construct
SKIR

SEQ ID NO: 2690 - protein, 4 aa, ARTIFICIAL SEQUENCE
  Synthetic Construct
SKIS

SEQ ID NO: 2691 - protein, 4 aa, ARTIFICIAL SEQUENCE
  Synthetic Construct
SKIT

SEQ ID NO: 2692 - protein, 4 aa, ARTIFICIAL SEQUENCE
  Synthetic Construct
SKIY

SEQ ID NO: 2693 - protein, 4 aa, ARTIFICIAL SEQUENCE
  Synthetic Construct
SKLA

SEQ ID NO: 2694 - protein, 4 aa, ARTIFICIAL SEQUENCE
  Synthetic Construct
SKLD

SEQ ID NO: 2695 - protein, 4 aa, ARTIFICIAL SEQUENCE
  Synthetic Construct
SKLE

SEQ ID NO: 2696 - protein, 4 aa, ARTIFICIAL SEQUENCE
  Synthetic Construct
SKLF

SEQ ID NO: 2697 - protein, 4 aa, ARTIFICIAL SEQUENCE
  Synthetic Construct
SKLG

SEQ ID NO: 2698 - protein, 4 aa, ARTIFICIAL SEQUENCE
  Synthetic Construct
SKLH

SEQ ID NO: 2699 - protein, 4 aa, ARTIFICIAL SEQUENCE
  Synthetic Construct
SKLI

SEQ ID NO: 2700 - protein, 4 aa, ARTIFICIAL SEQUENCE
  Synthetic Construct
SKLL

SEQ ID NO: 2701 - protein, 4 aa, ARTIFICIAL SEQUENCE
  Synthetic Construct
SKLN

SEQ ID NO: 2702 - protein, 4 aa, ARTIFICIAL SEQUENCE
  Synthetic Construct
SKLQ

SEQ ID NO: 2703 - protein, 4 aa, ARTIFICIAL SEQUENCE
  Synthetic Construct
SKLR

SEQ ID NO: 2704 - protein, 4 aa, ARTIFICIAL SEQUENCE
  Synthetic Construct
SKLS

SEQ ID NO: 2705 - protein, 4 aa, ARTIFICIAL SEQUENCE
  Synthetic Construct
SKLT

SEQ ID NO: 2706 - protein, 4 aa, ARTIFICIAL SEQUENCE
  Synthetic Construct
SKLY

SEQ ID NO: 2707 - protein, 4 aa, ARTIFICIAL SEQUENCE
  Synthetic Construct
SKNA

SEQ ID NO: 2708 - protein, 4 aa, ARTIFICIAL SEQUENCE
  Synthetic Construct
SKND

SEQ ID NO: 2709 - protein, 4 aa, ARTIFICIAL SEQUENCE
  Synthetic Construct
SKNE

SEQ ID NO: 2710 - protein, 4 aa, ARTIFICIAL SEQUENCE
  Synthetic Construct
SKNF

SEQ ID NO: 2711 - protein, 4 aa, ARTIFICIAL SEQUENCE
  Synthetic Construct
SKNG

SEQ ID NO: 2712 - protein, 4 aa, ARTIFICIAL SEQUENCE
  Synthetic Construct
SKNH

SEQ ID NO: 2713 - protein, 4 aa, ARTIFICIAL SEQUENCE
  Synthetic Construct
SKNI

SEQ ID NO: 2714 - protein, 4 aa, ARTIFICIAL SEQUENCE
  Synthetic Construct
SKNL

SEQ ID NO: 2715 - protein, 4 aa, ARTIFICIAL SEQUENCE
  Synthetic Construct
SKNN

SEQ ID NO: 2716 - protein, 4 aa, ARTIFICIAL SEQUENCE
  Synthetic Construct
SKNQ

SEQ ID NO: 2717 - protein, 4 aa, ARTIFICIAL SEQUENCE
  Synthetic Construct
SKNR

SEQ ID NO: 2718 - protein, 4 aa, ARTIFICIAL SEQUENCE
  Synthetic Construct
SKNS

SEQ ID NO: 2719 - protein, 4 aa, ARTIFICIAL SEQUENCE
  Synthetic Construct
SKNT

SEQ ID NO: 2720 - protein, 4 aa, ARTIFICIAL SEQUENCE
  Synthetic Construct
SKNY

SEQ ID NO: 2721 - protein, 4 aa, ARTIFICIAL SEQUENCE
  Synthetic Construct
SKPA

SEQ ID NO: 2722 - protein, 4 aa, ARTIFICIAL SEQUENCE
  Synthetic Construct
SKPD

SEQ ID NO: 2723 - protein, 4 aa, ARTIFICIAL SEQUENCE
  Synthetic Construct
SKPE

SEQ ID NO: 2724 - protein, 4 aa, ARTIFICIAL SEQUENCE
  Synthetic Construct
SKPF

SEQ ID NO: 2725 - protein, 4 aa, ARTIFICIAL SEQUENCE
  Synthetic Construct
SKPG

SEQ ID NO: 2726 - protein, 4 aa, ARTIFICIAL SEQUENCE
  Synthetic Construct
SKPH

SEQ ID NO: 2727 - protein, 4 aa, ARTIFICIAL SEQUENCE
  Synthetic Construct
SKPI

SEQ ID NO: 2728 - protein, 4 aa, ARTIFICIAL SEQUENCE
  Synthetic Construct
SKPL

SEQ ID NO: 2729 - protein, 4 aa, ARTIFICIAL SEQUENCE
  Synthetic Construct
SKPN

SEQ ID NO: 2730 - protein, 4 aa, ARTIFICIAL SEQUENCE
  Synthetic Construct
SKPQ

SEQ ID NO: 2731 - protein, 4 aa, ARTIFICIAL SEQUENCE
  Synthetic Construct
SKPR

SEQ ID NO: 2732 - protein, 4 aa, ARTIFICIAL SEQUENCE
  Synthetic Construct
SKPS

SEQ ID NO: 2733 - protein, 4 aa, ARTIFICIAL SEQUENCE
  Synthetic Construct
SKPT

SEQ ID NO: 2734 - protein, 4 aa, ARTIFICIAL SEQUENCE
  Synthetic Construct
SKPY

SEQ ID NO: 2735 - protein, 4 aa, ARTIFICIAL SEQUENCE
  Synthetic Construct
SKQA

SEQ ID NO: 2736 - protein, 4 aa, ARTIFICIAL SEQUENCE
  Synthetic Construct
SKQD

SEQ ID NO: 2737 - protein, 4 aa, ARTIFICIAL SEQUENCE
  Synthetic Construct
SKQE

SEQ ID NO: 2738 - protein, 4 aa, ARTIFICIAL SEQUENCE
  Synthetic Construct
SKQF

SEQ ID NO: 2739 - protein, 4 aa, ARTIFICIAL SEQUENCE
  Synthetic Construct
SKQG

SEQ ID NO: 2740 - protein, 4 aa, ARTIFICIAL SEQUENCE
  Synthetic Construct
SKQH

SEQ ID NO: 2741 - protein, 4 aa, ARTIFICIAL SEQUENCE
  Synthetic Construct
SKQI

SEQ ID NO: 2742 - protein, 4 aa, ARTIFICIAL SEQUENCE
  Synthetic Construct
SKQL

SEQ ID NO: 2743 - protein, 4 aa, ARTIFICIAL SEQUENCE
  Synthetic Construct
SKQN

SEQ ID NO: 2744 - protein, 4 aa, ARTIFICIAL SEQUENCE
  Synthetic Construct
SKQQ

SEQ ID NO: 2745 - protein, 4 aa, ARTIFICIAL SEQUENCE
  Synthetic Construct
SKQR

SEQ ID NO: 2746 - protein, 4 aa, ARTIFICIAL SEQUENCE
  Synthetic Construct
SKQS

SEQ ID NO: 2747 - protein, 4 aa, ARTIFICIAL SEQUENCE
  Synthetic Construct
SKQT

SEQ ID NO: 2748 - protein, 4 aa, ARTIFICIAL SEQUENCE
  Synthetic Construct
SKQY

SEQ ID NO: 2749 - protein, 4 aa, ARTIFICIAL SEQUENCE
  Synthetic Construct
SKRA

SEQ ID NO: 2750 - protein, 4 aa, ARTIFICIAL SEQUENCE
  Synthetic Construct
SKRD

SEQ ID NO: 2751 - protein, 4 aa, ARTIFICIAL SEQUENCE
  Synthetic Construct
SKRE

SEQ ID NO: 2752 - protein, 4 aa, ARTIFICIAL SEQUENCE
  Synthetic Construct
SKRF

SEQ ID NO: 2753 - protein, 4 aa, ARTIFICIAL SEQUENCE
  Synthetic Construct
SKRG

SEQ ID NO: 2754 - protein, 4 aa, ARTIFICIAL SEQUENCE
  Synthetic Construct
SKRH

SEQ ID NO: 2755 - protein, 4 aa, ARTIFICIAL SEQUENCE
  Synthetic Construct
SKRI

SEQ ID NO: 2756 - protein, 4 aa, ARTIFICIAL SEQUENCE
  Synthetic Construct
SKRL

SEQ ID NO: 2757 - protein, 4 aa, ARTIFICIAL SEQUENCE
  Synthetic Construct
SKRN

SEQ ID NO: 2758 - protein, 4 aa, ARTIFICIAL SEQUENCE
  Synthetic Construct
SKRQ

SEQ ID NO: 2759 - protein, 4 aa, ARTIFICIAL SEQUENCE
  Synthetic Construct
SKRR

SEQ ID NO: 2760 - protein, 4 aa, ARTIFICIAL SEQUENCE
  Synthetic Construct
SKRS

SEQ ID NO: 2761 - protein, 4 aa, ARTIFICIAL SEQUENCE
  Synthetic Construct
SKRT

SEQ ID NO: 2762 - protein, 4 aa, ARTIFICIAL SEQUENCE
  Synthetic Construct
SKRY

SEQ ID NO: 2763 - protein, 4 aa, ARTIFICIAL SEQUENCE
  Synthetic Construct
SKSA

SEQ ID NO: 2764 - protein, 4 aa, ARTIFICIAL SEQUENCE
  Synthetic Construct
SKSD

SEQ ID NO: 2765 - protein, 4 aa, ARTIFICIAL SEQUENCE
  Synthetic Construct
SKSE

SEQ ID NO: 2766 - protein, 4 aa, ARTIFICIAL SEQUENCE
  Synthetic Construct
SKSF

SEQ ID NO: 2767 - protein, 4 aa, ARTIFICIAL SEQUENCE
  Synthetic Construct
SKSG

SEQ ID NO: 2768 - protein, 4 aa, ARTIFICIAL SEQUENCE
  Synthetic Construct
SKSH

SEQ ID NO: 2769 - protein, 4 aa, ARTIFICIAL SEQUENCE
  Synthetic Construct
SKSI

SEQ ID NO: 2770 - protein, 4 aa, ARTIFICIAL SEQUENCE
  Synthetic Construct
SKSL

SEQ ID NO: 2771 - protein, 4 aa, ARTIFICIAL SEQUENCE
  Synthetic Construct
SKSN

SEQ ID NO: 2772 - protein, 4 aa, ARTIFICIAL SEQUENCE
  Synthetic Construct
SKSQ

SEQ ID NO: 2773 - protein, 4 aa, ARTIFICIAL SEQUENCE
  Synthetic Construct
SKSR

SEQ ID NO: 2774 - protein, 4 aa, ARTIFICIAL SEQUENCE
  Synthetic Construct
SKSS

SEQ ID NO: 2775 - protein, 4 aa, ARTIFICIAL SEQUENCE
  Synthetic Construct
SKST

SEQ ID NO: 2776 - protein, 4 aa, ARTIFICIAL SEQUENCE
  Synthetic Construct
SKSY

SEQ ID NO: 2777 - protein, 4 aa, ARTIFICIAL SEQUENCE
  Synthetic Construct
SKTA

SEQ ID NO: 2778 - protein, 4 aa, ARTIFICIAL SEQUENCE
  Synthetic Construct
SKTD

SEQ ID NO: 2779 - protein, 4 aa, ARTIFICIAL SEQUENCE
  Synthetic Construct
SKTE

SEQ ID NO: 2780 - protein, 4 aa, ARTIFICIAL SEQUENCE
  Synthetic Construct
SKTF

SEQ ID NO: 2781 - protein, 4 aa, ARTIFICIAL SEQUENCE
  Synthetic Construct
SKTG

SEQ ID NO: 2782 - protein, 4 aa, ARTIFICIAL SEQUENCE
  Synthetic Construct
SKTH

SEQ ID NO: 2783 - protein, 4 aa, ARTIFICIAL SEQUENCE
  Synthetic Construct
SKTI

SEQ ID NO: 2784 - protein, 4 aa, ARTIFICIAL SEQUENCE
  Synthetic Construct
SKTL

SEQ ID NO: 2785 - protein, 4 aa, ARTIFICIAL SEQUENCE
  Synthetic Construct
SKTN

SEQ ID NO: 2786 - protein, 4 aa, ARTIFICIAL SEQUENCE
  Synthetic Construct
SKTQ

SEQ ID NO: 2787 - protein, 4 aa, ARTIFICIAL SEQUENCE
  Synthetic Construct
SKTR

SEQ ID NO: 2788 - protein, 4 aa, ARTIFICIAL SEQUENCE
  Synthetic Construct
SKTS

SEQ ID NO: 2789 - protein, 4 aa, ARTIFICIAL SEQUENCE
  Synthetic Construct
SKTT

SEQ ID NO: 2790 - protein, 4 aa, ARTIFICIAL SEQUENCE
  Synthetic Construct
SKTY

SEQ ID NO: 2791 - protein, 4 aa, ARTIFICIAL SEQUENCE
  Synthetic Construct
SKYA

SEQ ID NO: 2792 - protein, 4 aa, ARTIFICIAL SEQUENCE
  Synthetic Construct
SKYD

SEQ ID NO: 2793 - protein, 4 aa, ARTIFICIAL SEQUENCE
  Synthetic Construct
SKYE

SEQ ID NO: 2794 - protein, 4 aa, ARTIFICIAL SEQUENCE
  Synthetic Construct
SKYF

SEQ ID NO: 2795 - protein, 4 aa, ARTIFICIAL SEQUENCE
  Synthetic Construct
SKYG

SEQ ID NO: 2796 - protein, 4 aa, ARTIFICIAL SEQUENCE
  Synthetic Construct
SKYH

SEQ ID NO: 2797 - protein, 4 aa, ARTIFICIAL SEQUENCE
  Synthetic Construct
SKYI

SEQ ID NO: 2798 - protein, 4 aa, ARTIFICIAL SEQUENCE
  Synthetic Construct
SKYL

SEQ ID NO: 2799 - protein, 4 aa, ARTIFICIAL SEQUENCE
  Synthetic Construct
SKYN

SEQ ID NO: 2800 - protein, 4 aa, ARTIFICIAL SEQUENCE
  Synthetic Construct
SKYQ

SEQ ID NO: 2801 - protein, 4 aa, ARTIFICIAL SEQUENCE
  Synthetic Construct
SKYR

SEQ ID NO: 2802 - protein, 4 aa, ARTIFICIAL SEQUENCE
  Synthetic Construct
SKYS

SEQ ID NO: 2803 - protein, 4 aa, ARTIFICIAL SEQUENCE
  Synthetic Construct
SKYT

SEQ ID NO: 2804 - protein, 4 aa, ARTIFICIAL SEQUENCE
  Synthetic Construct
SKYY

SEQ ID NO: 2805 - protein, 4 aa, ARTIFICIAL SEQUENCE
  Synthetic Construct
TKAA

SEQ ID NO: 2806 - protein, 4 aa, ARTIFICIAL SEQUENCE
  Synthetic Construct
TKAD

SEQ ID NO: 2807 - protein, 4 aa, ARTIFICIAL SEQUENCE
  Synthetic Construct
TKAE

SEQ ID NO: 2808 - protein, 4 aa, ARTIFICIAL SEQUENCE
  Synthetic Construct
TKAF

SEQ ID NO: 2809 - protein, 4 aa, ARTIFICIAL SEQUENCE
  Synthetic Construct
TKAG

SEQ ID NO: 2810 - protein, 4 aa, ARTIFICIAL SEQUENCE
  Synthetic Construct
TKAH

SEQ ID NO: 2811 - protein, 4 aa, ARTIFICIAL SEQUENCE
  Synthetic Construct
TKAI

SEQ ID NO: 2812 - protein, 4 aa, ARTIFICIAL SEQUENCE
  Synthetic Construct
TKAL

SEQ ID NO: 2813 - protein, 4 aa, ARTIFICIAL SEQUENCE
  Synthetic Construct
TKAN

SEQ ID NO: 2814 - protein, 4 aa, ARTIFICIAL SEQUENCE
  Synthetic Construct
TKAQ

SEQ ID NO: 2815 - protein, 4 aa, ARTIFICIAL SEQUENCE
  Synthetic Construct
TKAR

SEQ ID NO: 2816 - protein, 4 aa, ARTIFICIAL SEQUENCE
  Synthetic Construct
TKAS

SEQ ID NO: 2817 - protein, 4 aa, ARTIFICIAL SEQUENCE
  Synthetic Construct
TKAT

SEQ ID NO: 2818 - protein, 4 aa, ARTIFICIAL SEQUENCE
  Synthetic Construct
TKAY

SEQ ID NO: 2819 - protein, 4 aa, ARTIFICIAL SEQUENCE
  Synthetic Construct
TKDA

SEQ ID NO: 2820 - protein, 4 aa, ARTIFICIAL SEQUENCE
  Synthetic Construct
TKDD

SEQ ID NO: 2821 - protein, 4 aa, ARTIFICIAL SEQUENCE
  Synthetic Construct
TKDE

SEQ ID NO: 2822 - protein, 4 aa, ARTIFICIAL SEQUENCE
  Synthetic Construct
TKDF

SEQ ID NO: 2823 - protein, 4 aa, ARTIFICIAL SEQUENCE
  Synthetic Construct
TKDG

SEQ ID NO: 2824 - protein, 4 aa, ARTIFICIAL SEQUENCE
  Synthetic Construct
TKDH

SEQ ID NO: 2825 - protein, 4 aa, ARTIFICIAL SEQUENCE
  Synthetic Construct
TKDI

SEQ ID NO: 2826 - protein, 4 aa, ARTIFICIAL SEQUENCE
  Synthetic Construct
TKDL

SEQ ID NO: 2827 - protein, 4 aa, ARTIFICIAL SEQUENCE
  Synthetic Construct
TKDN

SEQ ID NO: 2828 - protein, 4 aa, ARTIFICIAL SEQUENCE
  Synthetic Construct
TKDQ

SEQ ID NO: 2829 - protein, 4 aa, ARTIFICIAL SEQUENCE
  Synthetic Construct
TKDR

SEQ ID NO: 2830 - protein, 4 aa, ARTIFICIAL SEQUENCE
  Synthetic Construct
TKDS

SEQ ID NO: 2831 - protein, 4 aa, ARTIFICIAL SEQUENCE
  Synthetic Construct
TKDT

SEQ ID NO: 2832 - protein, 4 aa, ARTIFICIAL SEQUENCE
  Synthetic Construct
TKDY

SEQ ID NO: 2833 - protein, 4 aa, ARTIFICIAL SEQUENCE
  Synthetic Construct
TKEA

SEQ ID NO: 2834 - protein, 4 aa, ARTIFICIAL SEQUENCE
  Synthetic Construct
TKED

SEQ ID NO: 2835 - protein, 4 aa, ARTIFICIAL SEQUENCE
  Synthetic Construct
TKEE

SEQ ID NO: 2836 - protein, 4 aa, ARTIFICIAL SEQUENCE
  Synthetic Construct
TKEF

SEQ ID NO: 2837 - protein, 4 aa, ARTIFICIAL SEQUENCE
  Synthetic Construct
TKEG

SEQ ID NO: 2838 - protein, 4 aa, ARTIFICIAL SEQUENCE
  Synthetic Construct
TKEH

SEQ ID NO: 2839 - protein, 4 aa, ARTIFICIAL SEQUENCE
  Synthetic Construct
TKEI

SEQ ID NO: 2840 - protein, 4 aa, ARTIFICIAL SEQUENCE
  Synthetic Construct
TKEL

SEQ ID NO: 2841 - protein, 4 aa, ARTIFICIAL SEQUENCE
  Synthetic Construct
TKEN

SEQ ID NO: 2842 - protein, 4 aa, ARTIFICIAL SEQUENCE
  Synthetic Construct
TKEQ

SEQ ID NO: 2843 - protein, 4 aa, ARTIFICIAL SEQUENCE
  Synthetic Construct
TKER

SEQ ID NO: 2844 - protein, 4 aa, ARTIFICIAL SEQUENCE
  Synthetic Construct
TKES

SEQ ID NO: 2845 - protein, 4 aa, ARTIFICIAL SEQUENCE
  Synthetic Construct
TKET

SEQ ID NO: 2846 - protein, 4 aa, ARTIFICIAL SEQUENCE
  Synthetic Construct
TKEY

SEQ ID NO: 2847 - protein, 4 aa, ARTIFICIAL SEQUENCE
  Synthetic Construct
TKFA

SEQ ID NO: 2848 - protein, 4 aa, ARTIFICIAL SEQUENCE
  Synthetic Construct
TKFD

SEQ ID NO: 2849 - protein, 4 aa, ARTIFICIAL SEQUENCE
  Synthetic Construct
TKFE

SEQ ID NO: 2850 - protein, 4 aa, ARTIFICIAL SEQUENCE
  Synthetic Construct
TKFF

SEQ ID NO: 2851 - protein, 4 aa, ARTIFICIAL SEQUENCE
  Synthetic Construct
TKFG

SEQ ID NO: 2852 - protein, 4 aa, ARTIFICIAL SEQUENCE
  Synthetic Construct
TKFH

SEQ ID NO: 2853 - protein, 4 aa, ARTIFICIAL SEQUENCE
  Synthetic Construct
TKFI

SEQ ID NO: 2854 - protein, 4 aa, ARTIFICIAL SEQUENCE
  Synthetic Construct
TKFL

SEQ ID NO: 2855 - protein, 4 aa, ARTIFICIAL SEQUENCE
  Synthetic Construct
TKFN

SEQ ID NO: 2856 - protein, 4 aa, ARTIFICIAL SEQUENCE
  Synthetic Construct
TKFQ

SEQ ID NO: 2857 - protein, 4 aa, ARTIFICIAL SEQUENCE
  Synthetic Construct
TKFR

SEQ ID NO: 2858 - protein, 4 aa, ARTIFICIAL SEQUENCE
  Synthetic Construct
TKFS

SEQ ID NO: 2859 - protein, 4 aa, ARTIFICIAL SEQUENCE
  Synthetic Construct
TKFT

SEQ ID NO: 2860 - protein, 4 aa, ARTIFICIAL SEQUENCE
  Synthetic Construct
TKFY

SEQ ID NO: 2861 - protein, 4 aa, ARTIFICIAL SEQUENCE
  Synthetic Construct
TKGA

SEQ ID NO: 2862 - protein, 4 aa, ARTIFICIAL SEQUENCE
  Synthetic Construct
TKGD

SEQ ID NO: 2863 - protein, 4 aa, ARTIFICIAL SEQUENCE
  Synthetic Construct
TKGE

SEQ ID NO: 2864 - protein, 4 aa, ARTIFICIAL SEQUENCE
  Synthetic Construct
TKGF

SEQ ID NO: 2865 - protein, 4 aa, ARTIFICIAL SEQUENCE
  Synthetic Construct
TKGG

SEQ ID NO: 2866 - protein, 4 aa, ARTIFICIAL SEQUENCE
  Synthetic Construct
TKGH

SEQ ID NO: 2867 - protein, 4 aa, ARTIFICIAL SEQUENCE
  Synthetic Construct
TKGI

SEQ ID NO: 2868 - protein, 4 aa, ARTIFICIAL SEQUENCE
  Synthetic Construct
TKGL

SEQ ID NO: 2869 - protein, 4 aa, ARTIFICIAL SEQUENCE
  Synthetic Construct
TKGN

SEQ ID NO: 2870 - protein, 4 aa, ARTIFICIAL SEQUENCE
  Synthetic Construct
TKGQ

SEQ ID NO: 2871 - protein, 4 aa, ARTIFICIAL SEQUENCE
  Synthetic Construct
TKGR

SEQ ID NO: 2872 - protein, 4 aa, ARTIFICIAL SEQUENCE
  Synthetic Construct
TKGS

SEQ ID NO: 2873 - protein, 4 aa, ARTIFICIAL SEQUENCE
  Synthetic Construct
TKGT

SEQ ID NO: 2874 - protein, 4 aa, ARTIFICIAL SEQUENCE
  Synthetic Construct
TKGY

SEQ ID NO: 2875 - protein, 4 aa, ARTIFICIAL SEQUENCE
  Synthetic Construct
TKHA

SEQ ID NO: 2876 - protein, 4 aa, ARTIFICIAL SEQUENCE
  Synthetic Construct
TKHD

SEQ ID NO: 2877 - protein, 4 aa, ARTIFICIAL SEQUENCE
  Synthetic Construct
TKHE

SEQ ID NO: 2878 - protein, 4 aa, ARTIFICIAL SEQUENCE
  Synthetic Construct
TKHF

SEQ ID NO: 2879 - protein, 4 aa, ARTIFICIAL SEQUENCE
  Synthetic Construct
TKHG

SEQ ID NO: 2880 - protein, 4 aa, ARTIFICIAL SEQUENCE
  Synthetic Construct
TKHH

SEQ ID NO: 2881 - protein, 4 aa, ARTIFICIAL SEQUENCE
  Synthetic Construct
TKHI

SEQ ID NO: 2882 - protein, 4 aa, ARTIFICIAL SEQUENCE
  Synthetic Construct
TKHL

SEQ ID NO: 2883 - protein, 4 aa, ARTIFICIAL SEQUENCE
  Synthetic Construct
TKHN

SEQ ID NO: 2884 - protein, 4 aa, ARTIFICIAL SEQUENCE
  Synthetic Construct
TKHQ

SEQ ID NO: 2885 - protein, 4 aa, ARTIFICIAL SEQUENCE
  Synthetic Construct
TKHR

SEQ ID NO: 2886 - protein, 4 aa, ARTIFICIAL SEQUENCE
  Synthetic Construct
TKHS

SEQ ID NO: 2887 - protein, 4 aa, ARTIFICIAL SEQUENCE
  Synthetic Construct
TKHT

SEQ ID NO: 2888 - protein, 4 aa, ARTIFICIAL SEQUENCE
  Synthetic Construct
TKHY

SEQ ID NO: 2889 - protein, 4 aa, ARTIFICIAL SEQUENCE
  Synthetic Construct
TKIA

SEQ ID NO: 2890 - protein, 4 aa, ARTIFICIAL SEQUENCE
  Synthetic Construct
TKID

SEQ ID NO: 2891 - protein, 4 aa, ARTIFICIAL SEQUENCE
  Synthetic Construct
TKIE

SEQ ID NO: 2892 - protein, 4 aa, ARTIFICIAL SEQUENCE
  Synthetic Construct
TKIF

SEQ ID NO: 2893 - protein, 4 aa, ARTIFICIAL SEQUENCE
  Synthetic Construct
TKIG

SEQ ID NO: 2894 - protein, 4 aa, ARTIFICIAL SEQUENCE
  Synthetic Construct
TKIH

SEQ ID NO: 2895 - protein, 4 aa, ARTIFICIAL SEQUENCE
  Synthetic Construct
TKII

SEQ ID NO: 2896 - protein, 4 aa, ARTIFICIAL SEQUENCE
  Synthetic Construct
TKIL

SEQ ID NO: 2897 - protein, 4 aa, ARTIFICIAL SEQUENCE
  Synthetic Construct
TKIN

SEQ ID NO: 2898 - protein, 4 aa, ARTIFICIAL SEQUENCE
  Synthetic Construct
TKIQ

SEQ ID NO: 2899 - protein, 4 aa, ARTIFICIAL SEQUENCE
  Synthetic Construct
TKIR

SEQ ID NO: 2900 - protein, 4 aa, ARTIFICIAL SEQUENCE
  Synthetic Construct
TKIS

SEQ ID NO: 2901 - protein, 4 aa, ARTIFICIAL SEQUENCE
  Synthetic Construct
TKIT

SEQ ID NO: 2902 - protein, 4 aa, ARTIFICIAL SEQUENCE
  Synthetic Construct
TKIY

SEQ ID NO: 2903 - protein, 4 aa, ARTIFICIAL SEQUENCE
  Synthetic Construct
TKLA

SEQ ID NO: 2904 - protein, 4 aa, ARTIFICIAL SEQUENCE
  Synthetic Construct
TKLD

SEQ ID NO: 2905 - protein, 4 aa, ARTIFICIAL SEQUENCE
  Synthetic Construct
TKLE

SEQ ID NO: 2906 - protein, 4 aa, ARTIFICIAL SEQUENCE
  Synthetic Construct
TKLF

SEQ ID NO: 2907 - protein, 4 aa, ARTIFICIAL SEQUENCE
  Synthetic Construct
TKLG

SEQ ID NO: 2908 - protein, 4 aa, ARTIFICIAL SEQUENCE
  Synthetic Construct
TKLH

SEQ ID NO: 2909 - protein, 4 aa, ARTIFICIAL SEQUENCE
  Synthetic Construct
TKLI

SEQ ID NO: 2910 - protein, 4 aa, ARTIFICIAL SEQUENCE
  Synthetic Construct
TKLL

SEQ ID NO: 2911 - protein, 4 aa, ARTIFICIAL SEQUENCE
  Synthetic Construct
TKLN

SEQ ID NO: 2912 - protein, 4 aa, ARTIFICIAL SEQUENCE
  Synthetic Construct
TKLQ

SEQ ID NO: 2913 - protein, 4 aa, ARTIFICIAL SEQUENCE
  Synthetic Construct
TKLR

SEQ ID NO: 2914 - protein, 4 aa, ARTIFICIAL SEQUENCE
  Synthetic Construct
TKLS

SEQ ID NO: 2915 - protein, 4 aa, ARTIFICIAL SEQUENCE
  Synthetic Construct
TKLT

SEQ ID NO: 2916 - protein, 4 aa, ARTIFICIAL SEQUENCE
  Synthetic Construct
TKLY

SEQ ID NO: 2917 - protein, 4 aa, ARTIFICIAL SEQUENCE
  Synthetic Construct
TKNA

SEQ ID NO: 2918 - protein, 4 aa, ARTIFICIAL SEQUENCE
  Synthetic Construct
TKND

SEQ ID NO: 2919 - protein, 4 aa, ARTIFICIAL SEQUENCE
  Synthetic Construct
TKNE

SEQ ID NO: 2920 - protein, 4 aa, ARTIFICIAL SEQUENCE
  Synthetic Construct
TKNF

SEQ ID NO: 2921 - protein, 4 aa, ARTIFICIAL SEQUENCE
  Synthetic Construct
TKNG

SEQ ID NO: 2922 - protein, 4 aa, ARTIFICIAL SEQUENCE
  Synthetic Construct
TKNH

SEQ ID NO: 2923 - protein, 4 aa, ARTIFICIAL SEQUENCE
  Synthetic Construct
TKNI

SEQ ID NO: 2924 - protein, 4 aa, ARTIFICIAL SEQUENCE
  Synthetic Construct
TKNL

SEQ ID NO: 2925 - protein, 4 aa, ARTIFICIAL SEQUENCE
  Synthetic Construct
TKNN

SEQ ID NO: 2926 - protein, 4 aa, ARTIFICIAL SEQUENCE
  Synthetic Construct
TKNQ

SEQ ID NO: 2927 - protein, 4 aa, ARTIFICIAL SEQUENCE
  Synthetic Construct
TKNR

SEQ ID NO: 2928 - protein, 4 aa, ARTIFICIAL SEQUENCE
  Synthetic Construct
TKNS

SEQ ID NO: 2929 - protein, 4 aa, ARTIFICIAL SEQUENCE
  Synthetic Construct
TKNT

SEQ ID NO: 2930 - protein, 4 aa, ARTIFICIAL SEQUENCE
  Synthetic Construct
TKNY

SEQ ID NO: 2931 - protein, 4 aa, ARTIFICIAL SEQUENCE
  Synthetic Construct
TKPA

SEQ ID NO: 2932 - protein, 4 aa, ARTIFICIAL SEQUENCE
  Synthetic Construct
TKPD

SEQ ID NO: 2933 - protein, 4 aa, ARTIFICIAL SEQUENCE
  Synthetic Construct
TKPE

SEQ ID NO: 2934 - protein, 4 aa, ARTIFICIAL SEQUENCE
  Synthetic Construct
TKPF

SEQ ID NO: 2935 - protein, 4 aa, ARTIFICIAL SEQUENCE
  Synthetic Construct
TKPG

SEQ ID NO: 2936 - protein, 4 aa, ARTIFICIAL SEQUENCE
  Synthetic Construct
TKPH

SEQ ID NO: 2937 - protein, 4 aa, ARTIFICIAL SEQUENCE
  Synthetic Construct
TKPI

SEQ ID NO: 2938 - protein, 4 aa, ARTIFICIAL SEQUENCE
  Synthetic Construct
TKPL

SEQ ID NO: 2939 - protein, 4 aa, ARTIFICIAL SEQUENCE
  Synthetic Construct
TKPN

SEQ ID NO: 2940 - protein, 4 aa, ARTIFICIAL SEQUENCE
  Synthetic Construct
TKPQ

SEQ ID NO: 2941 - protein, 4 aa, ARTIFICIAL SEQUENCE
  Synthetic Construct
TKPR

SEQ ID NO: 2942 - protein, 4 aa, ARTIFICIAL SEQUENCE
  Synthetic Construct
TKPS

SEQ ID NO: 2943 - protein, 4 aa, ARTIFICIAL SEQUENCE
  Synthetic Construct
TKPT

SEQ ID NO: 2944 - protein, 4 aa, ARTIFICIAL SEQUENCE
  Synthetic Construct
TKPY

SEQ ID NO: 2945 - protein, 4 aa, ARTIFICIAL SEQUENCE
  Synthetic Construct
TKQA

SEQ ID NO: 2946 - protein, 4 aa, ARTIFICIAL SEQUENCE
  Synthetic Construct
TKQD

SEQ ID NO: 2947 - protein, 4 aa, ARTIFICIAL SEQUENCE
  Synthetic Construct
TKQE

SEQ ID NO: 2948 - protein, 4 aa, ARTIFICIAL SEQUENCE
  Synthetic Construct
TKQF

SEQ ID NO: 2949 - protein, 4 aa, ARTIFICIAL SEQUENCE
  Synthetic Construct
TKQG

SEQ ID NO: 2950 - protein, 4 aa, ARTIFICIAL SEQUENCE
  Synthetic Construct
TKQH

SEQ ID NO: 2951 - protein, 4 aa, ARTIFICIAL SEQUENCE
  Synthetic Construct
TKQI

SEQ ID NO: 2952 - protein, 4 aa, ARTIFICIAL SEQUENCE
  Synthetic Construct
TKQL

SEQ ID NO: 2953 - protein, 4 aa, ARTIFICIAL SEQUENCE
  Synthetic Construct
TKQN

SEQ ID NO: 2954 - protein, 4 aa, ARTIFICIAL SEQUENCE
  Synthetic Construct
TKQQ

SEQ ID NO: 2955 - protein, 4 aa, ARTIFICIAL SEQUENCE
  Synthetic Construct
TKQR

SEQ ID NO: 2956 - protein, 4 aa, ARTIFICIAL SEQUENCE
  Synthetic Construct
TKQS

SEQ ID NO: 2957 - protein, 4 aa, ARTIFICIAL SEQUENCE
  Synthetic Construct
TKQT

SEQ ID NO: 2958 - protein, 4 aa, ARTIFICIAL SEQUENCE
  Synthetic Construct
TKQY

SEQ ID NO: 2959 - protein, 4 aa, ARTIFICIAL SEQUENCE
  Synthetic Construct
TKRA

SEQ ID NO: 2960 - protein, 4 aa, ARTIFICIAL SEQUENCE
  Synthetic Construct
TKRD

SEQ ID NO: 2961 - protein, 4 aa, ARTIFICIAL SEQUENCE
  Synthetic Construct
TKRE

SEQ ID NO: 2962 - protein, 4 aa, ARTIFICIAL SEQUENCE
  Synthetic Construct
TKRF

SEQ ID NO: 2963 - protein, 4 aa, ARTIFICIAL SEQUENCE
  Synthetic Construct
TKRG

SEQ ID NO: 2964 - protein, 4 aa, ARTIFICIAL SEQUENCE
  Synthetic Construct
TKRH

SEQ ID NO: 2965 - protein, 4 aa, ARTIFICIAL SEQUENCE
  Synthetic Construct
TKRI

SEQ ID NO: 2966 - protein, 4 aa, ARTIFICIAL SEQUENCE
  Synthetic Construct
TKRL

SEQ ID NO: 2967 - protein, 4 aa, ARTIFICIAL SEQUENCE
  Synthetic Construct
TKRN

SEQ ID NO: 2968 - protein, 4 aa, ARTIFICIAL SEQUENCE
  Synthetic Construct
TKRQ

SEQ ID NO: 2969 - protein, 4 aa, ARTIFICIAL SEQUENCE
  Synthetic Construct
TKRR

SEQ ID NO: 2970 - protein, 4 aa, ARTIFICIAL SEQUENCE
  Synthetic Construct
TKRS

SEQ ID NO: 2971 - protein, 4 aa, ARTIFICIAL SEQUENCE
  Synthetic Construct
TKRT

SEQ ID NO: 2972 - protein, 4 aa, ARTIFICIAL SEQUENCE
  Synthetic Construct
TKRY

SEQ ID NO: 2973 - protein, 4 aa, ARTIFICIAL SEQUENCE
  Synthetic Construct
TKSA

SEQ ID NO: 2974 - protein, 4 aa, ARTIFICIAL SEQUENCE
  Synthetic Construct
TKSD

SEQ ID NO: 2975 - protein, 4 aa, ARTIFICIAL SEQUENCE
  Synthetic Construct
TKSE

SEQ ID NO: 2976 - protein, 4 aa, ARTIFICIAL SEQUENCE
  Synthetic Construct
TKSF

SEQ ID NO: 2977 - protein, 4 aa, ARTIFICIAL SEQUENCE
  Synthetic Construct
TKSG

SEQ ID NO: 2978 - protein, 4 aa, ARTIFICIAL SEQUENCE
  Synthetic Construct
TKSH

SEQ ID NO: 2979 - protein, 4 aa, ARTIFICIAL SEQUENCE
  Synthetic Construct
TKSI

SEQ ID NO: 2980 - protein, 4 aa, ARTIFICIAL SEQUENCE
  Synthetic Construct
TKSL

SEQ ID NO: 2981 - protein, 4 aa, ARTIFICIAL SEQUENCE
  Synthetic Construct
TKSN

SEQ ID NO: 2982 - protein, 4 aa, ARTIFICIAL SEQUENCE
  Synthetic Construct
TKSQ

SEQ ID NO: 2983 - protein, 4 aa, ARTIFICIAL SEQUENCE
  Synthetic Construct
TKSR

SEQ ID NO: 2984 - protein, 4 aa, ARTIFICIAL SEQUENCE
  Synthetic Construct
TKSS

SEQ ID NO: 2985 - protein, 4 aa, ARTIFICIAL SEQUENCE
  Synthetic Construct
TKST

SEQ ID NO: 2986 - protein, 4 aa, ARTIFICIAL SEQUENCE
  Synthetic Construct
TKSY

SEQ ID NO: 2987 - protein, 4 aa, ARTIFICIAL SEQUENCE
  Synthetic Construct
TKTA

SEQ ID NO: 2988 - protein, 4 aa, ARTIFICIAL SEQUENCE
  Synthetic Construct
TKTD

SEQ ID NO: 2989 - protein, 4 aa, ARTIFICIAL SEQUENCE
  Synthetic Construct
TKTE

SEQ ID NO: 2990 - protein, 4 aa, ARTIFICIAL SEQUENCE
  Synthetic Construct
TKTF

SEQ ID NO: 2991 - protein, 4 aa, ARTIFICIAL SEQUENCE
  Synthetic Construct
TKTG

SEQ ID NO: 2992 - protein, 4 aa, ARTIFICIAL SEQUENCE
  Synthetic Construct
TKTH

SEQ ID NO: 2993 - protein, 4 aa, ARTIFICIAL SEQUENCE
  Synthetic Construct
TKTI

SEQ ID NO: 2994 - protein, 4 aa, ARTIFICIAL SEQUENCE
  Synthetic Construct
TKTL

SEQ ID NO: 2995 - protein, 4 aa, ARTIFICIAL SEQUENCE
  Synthetic Construct
TKTN

SEQ ID NO: 2996 - protein, 4 aa, ARTIFICIAL SEQUENCE
  Synthetic Construct
TKTQ

SEQ ID NO: 2997 - protein, 4 aa, ARTIFICIAL SEQUENCE
  Synthetic Construct
TKTR

SEQ ID NO: 2998 - protein, 4 aa, ARTIFICIAL SEQUENCE
  Synthetic Construct
TKTS

SEQ ID NO: 2999 - protein, 4 aa, ARTIFICIAL SEQUENCE
  Synthetic Construct
TKTT

SEQ ID NO: 3000 - protein, 4 aa, ARTIFICIAL SEQUENCE
  Synthetic Construct
TKTY

SEQ ID NO: 3001 - protein, 4 aa, ARTIFICIAL SEQUENCE
  Synthetic Construct
TKYA

SEQ ID NO: 3002 - protein, 4 aa, ARTIFICIAL SEQUENCE
  Synthetic Construct
TKYD

SEQ ID NO: 3003 - protein, 4 aa, ARTIFICIAL SEQUENCE
  Synthetic Construct
TKYE

SEQ ID NO: 3004 - protein, 4 aa, ARTIFICIAL SEQUENCE
  Synthetic Construct
TKYF

SEQ ID NO: 3005 - protein, 4 aa, ARTIFICIAL SEQUENCE
  Synthetic Construct
TKYG

SEQ ID NO: 3006 - protein, 4 aa, ARTIFICIAL SEQUENCE
  Synthetic Construct
TKYH

SEQ ID NO: 3007 - protein, 4 aa, ARTIFICIAL SEQUENCE
  Synthetic Construct
TKYI

SEQ ID NO: 3008 - protein, 4 aa, ARTIFICIAL SEQUENCE
  Synthetic Construct
TKYL

SEQ ID NO: 3009 - protein, 4 aa, ARTIFICIAL SEQUENCE
  Synthetic Construct
TKYN

SEQ ID NO: 3010 - protein, 4 aa, ARTIFICIAL SEQUENCE
  Synthetic Construct
TKYQ

SEQ ID NO: 3011 - protein, 4 aa, ARTIFICIAL SEQUENCE
  Synthetic Construct
TKYR

SEQ ID NO: 3012 - protein, 4 aa, ARTIFICIAL SEQUENCE
  Synthetic Construct
TKYS

SEQ ID NO: 3013 - protein, 4 aa, ARTIFICIAL SEQUENCE
  Synthetic Construct
TKYT

SEQ ID NO: 3014 - protein, 4 aa, ARTIFICIAL SEQUENCE
  Synthetic Construct
TKYY

SEQ ID NO: 3015 - protein, 4 aa, ARTIFICIAL SEQUENCE
  Synthetic Construct
YKAA

SEQ ID NO: 3016 - protein, 4 aa, ARTIFICIAL SEQUENCE
  Synthetic Construct
YKAD

SEQ ID NO: 3017 - protein, 4 aa, ARTIFICIAL SEQUENCE
  Synthetic Construct
YKAE

SEQ ID NO: 3018 - protein, 4 aa, ARTIFICIAL SEQUENCE
  Synthetic Construct
YKAF

SEQ ID NO: 3019 - protein, 4 aa, ARTIFICIAL SEQUENCE
  Synthetic Construct
YKAG

SEQ ID NO: 3020 - protein, 4 aa, ARTIFICIAL SEQUENCE
  Synthetic Construct
YKAH

SEQ ID NO: 3021 - protein, 4 aa, ARTIFICIAL SEQUENCE
  Synthetic Construct
YKAI

SEQ ID NO: 3022 - protein, 4 aa, ARTIFICIAL SEQUENCE
  Synthetic Construct
YKAL

SEQ ID NO: 3023 - protein, 4 aa, ARTIFICIAL SEQUENCE
  Synthetic Construct
YKAN

SEQ ID NO: 3024 - protein, 4 aa, ARTIFICIAL SEQUENCE
  Synthetic Construct
YKAQ

SEQ ID NO: 3025 - protein, 4 aa, ARTIFICIAL SEQUENCE
  Synthetic Construct
YKAR

SEQ ID NO: 3026 - protein, 4 aa, ARTIFICIAL SEQUENCE
  Synthetic Construct
YKAS

SEQ ID NO: 3027 - protein, 4 aa, ARTIFICIAL SEQUENCE
  Synthetic Construct
YKAT

SEQ ID NO: 3028 - protein, 4 aa, ARTIFICIAL SEQUENCE
  Synthetic Construct
YKAY

SEQ ID NO: 3029 - protein, 4 aa, ARTIFICIAL SEQUENCE
  Synthetic Construct
YKDA

SEQ ID NO: 3030 - protein, 4 aa, ARTIFICIAL SEQUENCE
  Synthetic Construct
YKDD

SEQ ID NO: 3031 - protein, 4 aa, ARTIFICIAL SEQUENCE
  Synthetic Construct
YKDE

SEQ ID NO: 3032 - protein, 4 aa, ARTIFICIAL SEQUENCE
  Synthetic Construct
YKDF

SEQ ID NO: 3033 - protein, 4 aa, ARTIFICIAL SEQUENCE
  Synthetic Construct
YKDG

SEQ ID NO: 3034 - protein, 4 aa, ARTIFICIAL SEQUENCE
  Synthetic Construct
YKDH

SEQ ID NO: 3035 - protein, 4 aa, ARTIFICIAL SEQUENCE
  Synthetic Construct
YKDI

SEQ ID NO: 3036 - protein, 4 aa, ARTIFICIAL SEQUENCE
  Synthetic Construct
YKDL

SEQ ID NO: 3037 - protein, 4 aa, ARTIFICIAL SEQUENCE
  Synthetic Construct
YKDN

SEQ ID NO: 3038 - protein, 4 aa, ARTIFICIAL SEQUENCE
  Synthetic Construct
YKDQ

SEQ ID NO: 3039 - protein, 4 aa, ARTIFICIAL SEQUENCE
  Synthetic Construct
YKDR

SEQ ID NO: 3040 - protein, 4 aa, ARTIFICIAL SEQUENCE
  Synthetic Construct
YKDS

SEQ ID NO: 3041 - protein, 4 aa, ARTIFICIAL SEQUENCE
  Synthetic Construct
YKDT

SEQ ID NO: 3042 - protein, 4 aa, ARTIFICIAL SEQUENCE
  Synthetic Construct
YKDY

SEQ ID NO: 3043 - protein, 4 aa, ARTIFICIAL SEQUENCE
  Synthetic Construct
YKEA

SEQ ID NO: 3044 - protein, 4 aa, ARTIFICIAL SEQUENCE
  Synthetic Construct
YKED

SEQ ID NO: 3045 - protein, 4 aa, ARTIFICIAL SEQUENCE
  Synthetic Construct
YKEE

SEQ ID NO: 3046 - protein, 4 aa, ARTIFICIAL SEQUENCE
  Synthetic Construct
YKEF

SEQ ID NO: 3047 - protein, 4 aa, ARTIFICIAL SEQUENCE
  Synthetic Construct
YKEG

SEQ ID NO: 3048 - protein, 4 aa, ARTIFICIAL SEQUENCE
  Synthetic Construct
YKEH

SEQ ID NO: 3049 - protein, 4 aa, ARTIFICIAL SEQUENCE
  Synthetic Construct
YKEI

SEQ ID NO: 3050 - protein, 4 aa, ARTIFICIAL SEQUENCE
  Synthetic Construct
YKEL

SEQ ID NO: 3051 - protein, 4 aa, ARTIFICIAL SEQUENCE
  Synthetic Construct
YKEN

SEQ ID NO: 3052 - protein, 4 aa, ARTIFICIAL SEQUENCE
  Synthetic Construct
YKEQ

SEQ ID NO: 3053 - protein, 4 aa, ARTIFICIAL SEQUENCE
  Synthetic Construct
YKER

SEQ ID NO: 3054 - protein, 4 aa, ARTIFICIAL SEQUENCE
  Synthetic Construct
YKES

SEQ ID NO: 3055 - protein, 4 aa, ARTIFICIAL SEQUENCE
  Synthetic Construct
YKET

SEQ ID NO: 3056 - protein, 4 aa, ARTIFICIAL SEQUENCE
  Synthetic Construct
YKEY

SEQ ID NO: 3057 - protein, 4 aa, ARTIFICIAL SEQUENCE
  Synthetic Construct
YKFA

SEQ ID NO: 3058 - protein, 4 aa, ARTIFICIAL SEQUENCE
  Synthetic Construct
YKFD

SEQ ID NO: 3059 - protein, 4 aa, ARTIFICIAL SEQUENCE
  Synthetic Construct
YKFE

SEQ ID NO: 3060 - protein, 4 aa, ARTIFICIAL SEQUENCE
  Synthetic Construct
YKFF

SEQ ID NO: 3061 - protein, 4 aa, ARTIFICIAL SEQUENCE
  Synthetic Construct
YKFG

SEQ ID NO: 3062 - protein, 4 aa, ARTIFICIAL SEQUENCE
  Synthetic Construct
YKFH

SEQ ID NO: 3063 - protein, 4 aa, ARTIFICIAL SEQUENCE
  Synthetic Construct
YKFI

SEQ ID NO: 3064 - protein, 4 aa, ARTIFICIAL SEQUENCE
  Synthetic Construct
YKFL

SEQ ID NO: 3065 - protein, 4 aa, ARTIFICIAL SEQUENCE
  Synthetic Construct
YKFN

SEQ ID NO: 3066 - protein, 4 aa, ARTIFICIAL SEQUENCE
  Synthetic Construct
YKFQ

SEQ ID NO: 3067 - protein, 4 aa, ARTIFICIAL SEQUENCE
  Synthetic Construct
YKFR

SEQ ID NO: 3068 - protein, 4 aa, ARTIFICIAL SEQUENCE
  Synthetic Construct
YKFS

SEQ ID NO: 3069 - protein, 4 aa, ARTIFICIAL SEQUENCE
  Synthetic Construct
YKFT

SEQ ID NO: 3070 - protein, 4 aa, ARTIFICIAL SEQUENCE
  Synthetic Construct
YKFY

SEQ ID NO: 3071 - protein, 4 aa, ARTIFICIAL SEQUENCE
  Synthetic Construct
YKGA

SEQ ID NO: 3072 - protein, 4 aa, ARTIFICIAL SEQUENCE
  Synthetic Construct
YKGD

SEQ ID NO: 3073 - protein, 4 aa, ARTIFICIAL SEQUENCE
  Synthetic Construct
YKGE

SEQ ID NO: 3074 - protein, 4 aa, ARTIFICIAL SEQUENCE
  Synthetic Construct
YKGF

SEQ ID NO: 3075 - protein, 4 aa, ARTIFICIAL SEQUENCE
  Synthetic Construct
YKGG

SEQ ID NO: 3076 - protein, 4 aa, ARTIFICIAL SEQUENCE
  Synthetic Construct
YKGH

SEQ ID NO: 3077 - protein, 4 aa, ARTIFICIAL SEQUENCE
  Synthetic Construct
YKGI

SEQ ID NO: 3078 - protein, 4 aa, ARTIFICIAL SEQUENCE
  Synthetic Construct
YKGL

SEQ ID NO: 3079 - protein, 4 aa, ARTIFICIAL SEQUENCE
  Synthetic Construct
YKGN

SEQ ID NO: 3080 - protein, 4 aa, ARTIFICIAL SEQUENCE
  Synthetic Construct
YKGQ

SEQ ID NO: 3081 - protein, 4 aa, ARTIFICIAL SEQUENCE
  Synthetic Construct
YKGR

SEQ ID NO: 3082 - protein, 4 aa, ARTIFICIAL SEQUENCE
  Synthetic Construct
YKGS

SEQ ID NO: 3083 - protein, 4 aa, ARTIFICIAL SEQUENCE
  Synthetic Construct
YKGT

SEQ ID NO: 3084 - protein, 4 aa, ARTIFICIAL SEQUENCE
  Synthetic Construct
YKGY

SEQ ID NO: 3085 - protein, 4 aa, ARTIFICIAL SEQUENCE
  Synthetic Construct
YKHA

SEQ ID NO: 3086 - protein, 4 aa, ARTIFICIAL SEQUENCE
  Synthetic Construct
YKHD

SEQ ID NO: 3087 - protein, 4 aa, ARTIFICIAL SEQUENCE
  Synthetic Construct
YKHE

SEQ ID NO: 3088 - protein, 4 aa, ARTIFICIAL SEQUENCE
  Synthetic Construct
YKHF

SEQ ID NO: 3089 - protein, 4 aa, ARTIFICIAL SEQUENCE
  Synthetic Construct
YKHG

SEQ ID NO: 3090 - protein, 4 aa, ARTIFICIAL SEQUENCE
  Synthetic Construct
YKHH

SEQ ID NO: 3091 - protein, 4 aa, ARTIFICIAL SEQUENCE
  Synthetic Construct
YKHI

SEQ ID NO: 3092 - protein, 4 aa, ARTIFICIAL SEQUENCE
  Synthetic Construct
YKHL

SEQ ID NO: 3093 - protein, 4 aa, ARTIFICIAL SEQUENCE
  Synthetic Construct
YKHN

SEQ ID NO: 3094 - protein, 4 aa, ARTIFICIAL SEQUENCE
  Synthetic Construct
YKHQ

SEQ ID NO: 3095 - protein, 4 aa, ARTIFICIAL SEQUENCE
  Synthetic Construct
YKHR

SEQ ID NO: 3096 - protein, 4 aa, ARTIFICIAL SEQUENCE
  Synthetic Construct
YKHS

SEQ ID NO: 3097 - protein, 4 aa, ARTIFICIAL SEQUENCE
  Synthetic Construct
YKHT

SEQ ID NO: 3098 - protein, 4 aa, ARTIFICIAL SEQUENCE
  Synthetic Construct
YKHY

SEQ ID NO: 3099 - protein, 4 aa, ARTIFICIAL SEQUENCE
  Synthetic Construct
YKIA

SEQ ID NO: 3100 - protein, 4 aa, ARTIFICIAL SEQUENCE
  Synthetic Construct
YKID

SEQ ID NO: 3101 - protein, 4 aa, ARTIFICIAL SEQUENCE
  Synthetic Construct
YKIE

SEQ ID NO: 3102 - protein, 4 aa, ARTIFICIAL SEQUENCE
  Synthetic Construct
YKIF

SEQ ID NO: 3103 - protein, 4 aa, ARTIFICIAL SEQUENCE
  Synthetic Construct
YKIG

SEQ ID NO: 3104 - protein, 4 aa, ARTIFICIAL SEQUENCE
  Synthetic Construct
YKIH

SEQ ID NO: 3105 - protein, 4 aa, ARTIFICIAL SEQUENCE
  Synthetic Construct
YKII

SEQ ID NO: 3106 - protein, 4 aa, ARTIFICIAL SEQUENCE
  Synthetic Construct
YKIL

SEQ ID NO: 3107 - protein, 4 aa, ARTIFICIAL SEQUENCE
  Synthetic Construct
YKIN

SEQ ID NO: 3108 - protein, 4 aa, ARTIFICIAL SEQUENCE
  Synthetic Construct
YKIQ

SEQ ID NO: 3109 - protein, 4 aa, ARTIFICIAL SEQUENCE
  Synthetic Construct
YKIR

SEQ ID NO: 3110 - protein, 4 aa, ARTIFICIAL SEQUENCE
  Synthetic Construct
YKIS

SEQ ID NO: 3111 - protein, 4 aa, ARTIFICIAL SEQUENCE
  Synthetic Construct
YKIT

SEQ ID NO: 3112 - protein, 4 aa, ARTIFICIAL SEQUENCE
  Synthetic Construct
YKIY

SEQ ID NO: 3113 - protein, 4 aa, ARTIFICIAL SEQUENCE
  Synthetic Construct
YKLA

SEQ ID NO: 3114 - protein, 4 aa, ARTIFICIAL SEQUENCE
  Synthetic Construct
YKLD

SEQ ID NO: 3115 - protein, 4 aa, ARTIFICIAL SEQUENCE
  Synthetic Construct
YKLE

SEQ ID NO: 3116 - protein, 4 aa, ARTIFICIAL SEQUENCE
  Synthetic Construct
YKLF

SEQ ID NO: 3117 - protein, 4 aa, ARTIFICIAL SEQUENCE
  Synthetic Construct
YKLG

SEQ ID NO: 3118 - protein, 4 aa, ARTIFICIAL SEQUENCE
  Synthetic Construct
YKLH

SEQ ID NO: 3119 - protein, 4 aa, ARTIFICIAL SEQUENCE
  Synthetic Construct
YKLI

SEQ ID NO: 3120 - protein, 4 aa, ARTIFICIAL SEQUENCE
  Synthetic Construct
YKLL

SEQ ID NO: 3121 - protein, 4 aa, ARTIFICIAL SEQUENCE
  Synthetic Construct
YKLN

SEQ ID NO: 3122 - protein, 4 aa, ARTIFICIAL SEQUENCE
  Synthetic Construct
YKLQ

SEQ ID NO: 3123 - protein, 4 aa, ARTIFICIAL SEQUENCE
  Synthetic Construct
YKLR

SEQ ID NO: 3124 - protein, 4 aa, ARTIFICIAL SEQUENCE
  Synthetic Construct
YKLS

SEQ ID NO: 3125 - protein, 4 aa, ARTIFICIAL SEQUENCE
  Synthetic Construct
YKLT

SEQ ID NO: 3126 - protein, 4 aa, ARTIFICIAL SEQUENCE
  Synthetic Construct
YKLY

SEQ ID NO: 3127 - protein, 4 aa, ARTIFICIAL SEQUENCE
  Synthetic Construct
YKNA

SEQ ID NO: 3128 - protein, 4 aa, ARTIFICIAL SEQUENCE
  Synthetic Construct
YKND

SEQ ID NO: 3129 - protein, 4 aa, ARTIFICIAL SEQUENCE
  Synthetic Construct
YKNE

SEQ ID NO: 3130 - protein, 4 aa, ARTIFICIAL SEQUENCE
  Synthetic Construct
YKNF

SEQ ID NO: 3131 - protein, 4 aa, ARTIFICIAL SEQUENCE
  Synthetic Construct
YKNG

SEQ ID NO: 3132 - protein, 4 aa, ARTIFICIAL SEQUENCE
  Synthetic Construct
YKNH

SEQ ID NO: 3133 - protein, 4 aa, ARTIFICIAL SEQUENCE
  Synthetic Construct
YKNI

SEQ ID NO: 3134 - protein, 4 aa, ARTIFICIAL SEQUENCE
  Synthetic Construct
YKNL

SEQ ID NO: 3135 - protein, 4 aa, ARTIFICIAL SEQUENCE
  Synthetic Construct
YKNN

SEQ ID NO: 3136 - protein, 4 aa, ARTIFICIAL SEQUENCE
  Synthetic Construct
YKNQ

SEQ ID NO: 3137 - protein, 4 aa, ARTIFICIAL SEQUENCE
  Synthetic Construct
YKNR

SEQ ID NO: 3138 - protein, 4 aa, ARTIFICIAL SEQUENCE
  Synthetic Construct
YKNS

SEQ ID NO: 3139 - protein, 4 aa, ARTIFICIAL SEQUENCE
  Synthetic Construct
YKNT

SEQ ID NO: 3140 - protein, 4 aa, ARTIFICIAL SEQUENCE
  Synthetic Construct
YKNY

SEQ ID NO: 3141 - protein, 4 aa, ARTIFICIAL SEQUENCE
  Synthetic Construct
YKPA

SEQ ID NO: 3142 - protein, 4 aa, ARTIFICIAL SEQUENCE
  Synthetic Construct
YKPD

SEQ ID NO: 3143 - protein, 4 aa, ARTIFICIAL SEQUENCE
  Synthetic Construct
YKPE

SEQ ID NO: 3144 - protein, 4 aa, ARTIFICIAL SEQUENCE
  Synthetic Construct
YKPF

SEQ ID NO: 3145 - protein, 4 aa, ARTIFICIAL SEQUENCE
  Synthetic Construct
YKPG

SEQ ID NO: 3146 - protein, 4 aa, ARTIFICIAL SEQUENCE
  Synthetic Construct
YKPH

SEQ ID NO: 3147 - protein, 4 aa, ARTIFICIAL SEQUENCE
  Synthetic Construct
YKPI

SEQ ID NO: 3148 - protein, 4 aa, ARTIFICIAL SEQUENCE
  Synthetic Construct
YKPL

SEQ ID NO: 3149 - protein, 4 aa, ARTIFICIAL SEQUENCE
  Synthetic Construct
YKPN

SEQ ID NO: 3150 - protein, 4 aa, ARTIFICIAL SEQUENCE
  Synthetic Construct
YKPQ

SEQ ID NO: 3151 - protein, 4 aa, ARTIFICIAL SEQUENCE
  Synthetic Construct
YKPR

SEQ ID NO: 3152 - protein, 4 aa, ARTIFICIAL SEQUENCE
  Synthetic Construct
YKPS

SEQ ID NO: 3153 - protein, 4 aa, ARTIFICIAL SEQUENCE
  Synthetic Construct
YKPT

SEQ ID NO: 3154 - protein, 4 aa, ARTIFICIAL SEQUENCE
  Synthetic Construct
YKPY

SEQ ID NO: 3155 - protein, 4 aa, ARTIFICIAL SEQUENCE
  Synthetic Construct
YKQA

SEQ ID NO: 3156 - protein, 4 aa, ARTIFICIAL SEQUENCE
  Synthetic Construct
YKQD

SEQ ID NO: 3157 - protein, 4 aa, ARTIFICIAL SEQUENCE
  Synthetic Construct
YKQE

SEQ ID NO: 3158 - protein, 4 aa, ARTIFICIAL SEQUENCE
  Synthetic Construct
YKQF

SEQ ID NO: 3159 - protein, 4 aa, ARTIFICIAL SEQUENCE
  Synthetic Construct
YKQG

SEQ ID NO: 3160 - protein, 4 aa, ARTIFICIAL SEQUENCE
  Synthetic Construct
YKQH

SEQ ID NO: 3161 - protein, 4 aa, ARTIFICIAL SEQUENCE
  Synthetic Construct
YKQI

SEQ ID NO: 3162 - protein, 4 aa, ARTIFICIAL SEQUENCE
  Synthetic Construct
YKQL

SEQ ID NO: 3163 - protein, 4 aa, ARTIFICIAL SEQUENCE
  Synthetic Construct
YKQN

SEQ ID NO: 3164 - protein, 4 aa, ARTIFICIAL SEQUENCE
  Synthetic Construct
YKQQ

SEQ ID NO: 3165 - protein, 4 aa, ARTIFICIAL SEQUENCE
  Synthetic Construct
YKQR

SEQ ID NO: 3166 - protein, 4 aa, ARTIFICIAL SEQUENCE
  Synthetic Construct
YKQS

SEQ ID NO: 3167 - protein, 4 aa, ARTIFICIAL SEQUENCE
  Synthetic Construct
YKQT

SEQ ID NO: 3168 - protein, 4 aa, ARTIFICIAL SEQUENCE
  Synthetic Construct
YKQY

SEQ ID NO: 3169 - protein, 4 aa, ARTIFICIAL SEQUENCE
  Synthetic Construct
YKRA

SEQ ID NO: 3170 - protein, 4 aa, ARTIFICIAL SEQUENCE
  Synthetic Construct
YKRD

SEQ ID NO: 3171 - protein, 4 aa, ARTIFICIAL SEQUENCE
  Synthetic Construct
YKRE

SEQ ID NO: 3172 - protein, 4 aa, ARTIFICIAL SEQUENCE
  Synthetic Construct
YKRF

SEQ ID NO: 3173 - protein, 4 aa, ARTIFICIAL SEQUENCE
  Synthetic Construct
YKRG

SEQ ID NO: 3174 - protein, 4 aa, ARTIFICIAL SEQUENCE
  Synthetic Construct
YKRH

SEQ ID NO: 3175 - protein, 4 aa, ARTIFICIAL SEQUENCE
  Synthetic Construct
YKRI

SEQ ID NO: 3176 - protein, 4 aa, ARTIFICIAL SEQUENCE
  Synthetic Construct
YKRL

SEQ ID NO: 3177 - protein, 4 aa, ARTIFICIAL SEQUENCE
  Synthetic Construct
YKRN

SEQ ID NO: 3178 - protein, 4 aa, ARTIFICIAL SEQUENCE
  Synthetic Construct
YKRQ

SEQ ID NO: 3179 - protein, 4 aa, ARTIFICIAL SEQUENCE
  Synthetic Construct
YKRR

SEQ ID NO: 3180 - protein, 4 aa, ARTIFICIAL SEQUENCE
  Synthetic Construct
YKRS

SEQ ID NO: 3181 - protein, 4 aa, ARTIFICIAL SEQUENCE
  Synthetic Construct
YKRT

SEQ ID NO: 3182 - protein, 4 aa, ARTIFICIAL SEQUENCE
  Synthetic Construct
YKRY

SEQ ID NO: 3183 - protein, 4 aa, ARTIFICIAL SEQUENCE
  Synthetic Construct
YKSA

SEQ ID NO: 3184 - protein, 4 aa, ARTIFICIAL SEQUENCE
  Synthetic Construct
YKSD

SEQ ID NO: 3185 - protein, 4 aa, ARTIFICIAL SEQUENCE
  Synthetic Construct
YKSE

SEQ ID NO: 3186 - protein, 4 aa, ARTIFICIAL SEQUENCE
  Synthetic Construct
YKSF

SEQ ID NO: 3187 - protein, 4 aa, ARTIFICIAL SEQUENCE
  Synthetic Construct
YKSG

SEQ ID NO: 3188 - protein, 4 aa, ARTIFICIAL SEQUENCE
  Synthetic Construct
YKSH

SEQ ID NO: 3189 - protein, 4 aa, ARTIFICIAL SEQUENCE
  Synthetic Construct
YKSI

SEQ ID NO: 3190 - protein, 4 aa, ARTIFICIAL SEQUENCE
  Synthetic Construct
YKSL

SEQ ID NO: 3191 - protein, 4 aa, ARTIFICIAL SEQUENCE
  Synthetic Construct
YKSN

SEQ ID NO: 3192 - protein, 4 aa, ARTIFICIAL SEQUENCE
  Synthetic Construct
YKSQ

SEQ ID NO: 3193 - protein, 4 aa, ARTIFICIAL SEQUENCE
  Synthetic Construct
YKSR

SEQ ID NO: 3194 - protein, 4 aa, ARTIFICIAL SEQUENCE
  Synthetic Construct
YKSS

SEQ ID NO: 3195 - protein, 4 aa, ARTIFICIAL SEQUENCE
  Synthetic Construct
YKST

SEQ ID NO: 3196 - protein, 4 aa, ARTIFICIAL SEQUENCE
  Synthetic Construct
YKSY

SEQ ID NO: 3197 - protein, 4 aa, ARTIFICIAL SEQUENCE
  Synthetic Construct
YKTA

SEQ ID NO: 3198 - protein, 4 aa, ARTIFICIAL SEQUENCE
  Synthetic Construct
YKTD

SEQ ID NO: 3199 - protein, 4 aa, ARTIFICIAL SEQUENCE
  Synthetic Construct
YKTE

SEQ ID NO: 3200 - protein, 4 aa, ARTIFICIAL SEQUENCE
  Synthetic Construct
YKTF

SEQ ID NO: 3201 - protein, 4 aa, ARTIFICIAL SEQUENCE
  Synthetic Construct
YKTG

SEQ ID NO: 3202 - protein, 4 aa, ARTIFICIAL SEQUENCE
  Synthetic Construct
YKTH

SEQ ID NO: 3203 - protein, 4 aa, ARTIFICIAL SEQUENCE
  Synthetic Construct
YKTI

SEQ ID NO: 3204 - protein, 4 aa, ARTIFICIAL SEQUENCE
  Synthetic Construct
YKTL

SEQ ID NO: 3205 - protein, 4 aa, ARTIFICIAL SEQUENCE
  Synthetic Construct
YKTN

SEQ ID NO: 3206 - protein, 4 aa, ARTIFICIAL SEQUENCE
  Synthetic Construct
YKTQ

SEQ ID NO: 3207 - protein, 4 aa, ARTIFICIAL SEQUENCE
  Synthetic Construct
YKTR

SEQ ID NO: 3208 - protein, 4 aa, ARTIFICIAL SEQUENCE
  Synthetic Construct
YKTS

SEQ ID NO: 3209 - protein, 4 aa, ARTIFICIAL SEQUENCE
  Synthetic Construct
YKTT

SEQ ID NO: 3210 - protein, 4 aa, ARTIFICIAL SEQUENCE
  Synthetic Construct
YKTY

SEQ ID NO: 3211 - protein, 4 aa, ARTIFICIAL SEQUENCE
  Synthetic Construct
YKYA

SEQ ID NO: 3212 - protein, 4 aa, ARTIFICIAL SEQUENCE
  Synthetic Construct
YKYD

SEQ ID NO: 3213 - protein, 4 aa, ARTIFICIAL SEQUENCE
  Synthetic Construct
YKYE

SEQ ID NO: 3214 - protein, 4 aa, ARTIFICIAL SEQUENCE
  Synthetic Construct
YKYF

SEQ ID NO: 3215 - protein, 4 aa, ARTIFICIAL SEQUENCE
  Synthetic Construct
YKYG

SEQ ID NO: 3216 - protein, 4 aa, ARTIFICIAL SEQUENCE
  Synthetic Construct
YKYH

SEQ ID NO: 3217 - protein, 4 aa, ARTIFICIAL SEQUENCE
  Synthetic Construct
YKYI

SEQ ID NO: 3218 - protein, 4 aa, ARTIFICIAL SEQUENCE
  Synthetic Construct
YKYL

SEQ ID NO: 3219 - protein, 4 aa, ARTIFICIAL SEQUENCE
  Synthetic Construct
YKYN

SEQ ID NO: 3220 - protein, 4 aa, ARTIFICIAL SEQUENCE
  Synthetic Construct
YKYQ

SEQ ID NO: 3221 - protein, 4 aa, ARTIFICIAL SEQUENCE
  Synthetic Construct
YKYR

SEQ ID NO: 3222 - protein, 4 aa, ARTIFICIAL SEQUENCE
  Synthetic Construct
YKYS

SEQ ID NO: 3223 - protein, 4 aa, ARTIFICIAL SEQUENCE
  Synthetic Construct
YKYT

SEQ ID NO: 3224 - protein, 4 aa, ARTIFICIAL SEQUENCE
  Synthetic Construct
YKYY

SEQ ID NO: 3225 - protein, 5 aa, ARTIFICIAL SEQUENCE
  Synthetic Construct
KAAAK

SEQ ID NO: 3226 - protein, 5 aa, ARTIFICIAL SEQUENCE
  Synthetic Construct
KAADK

SEQ ID NO: 3227 - protein, 5 aa, ARTIFICIAL SEQUENCE
  Synthetic Construct
KAAEK

SEQ ID NO: 3228 - protein, 5 aa, ARTIFICIAL SEQUENCE
  Synthetic Construct
KAAFK

SEQ ID NO: 3229 - protein, 5 aa, ARTIFICIAL SEQUENCE
  Synthetic Construct
KAAGK

SEQ ID NO: 3230 - protein, 5 aa, ARTIFICIAL SEQUENCE
  Synthetic Construct
KAAHK

SEQ ID NO: 3231 - protein, 5 aa, ARTIFICIAL SEQUENCE
  Synthetic Construct
KAAIK

SEQ ID NO: 3232 - protein, 5 aa, ARTIFICIAL SEQUENCE
  Synthetic Construct
KAALK

SEQ ID NO: 3233 - protein, 5 aa, ARTIFICIAL SEQUENCE
  Synthetic Construct
KAANK

SEQ ID NO: 3234 - protein, 5 aa, ARTIFICIAL SEQUENCE
  Synthetic Construct
KAAQK

SEQ ID NO: 3235 - protein, 5 aa, ARTIFICIAL SEQUENCE
  Synthetic Construct
KAARK

SEQ ID NO: 3236 - protein, 5 aa, ARTIFICIAL SEQUENCE
  Synthetic Construct
KAASK

SEQ ID NO: 3237 - protein, 5 aa, ARTIFICIAL SEQUENCE
  Synthetic Construct
KAATK

SEQ ID NO: 3238 - protein, 5 aa, ARTIFICIAL SEQUENCE
  Synthetic Construct
KAAYK

SEQ ID NO: 3239 - protein, 5 aa, ARTIFICIAL SEQUENCE
  Synthetic Construct
KADAK

SEQ ID NO: 3240 - protein, 5 aa, ARTIFICIAL SEQUENCE
  Synthetic Construct
KADDK

SEQ ID NO: 3241 - protein, 5 aa, ARTIFICIAL SEQUENCE
  Synthetic Construct
KADEK

SEQ ID NO: 3242 - protein, 5 aa, ARTIFICIAL SEQUENCE
  Synthetic Construct
KADFK

SEQ ID NO: 3243 - protein, 5 aa, ARTIFICIAL SEQUENCE
  Synthetic Construct
KADGK

SEQ ID NO: 3244 - protein, 5 aa, ARTIFICIAL SEQUENCE
  Synthetic Construct
KADHK

SEQ ID NO: 3245 - protein, 5 aa, ARTIFICIAL SEQUENCE
  Synthetic Construct
KADIK

SEQ ID NO: 3246 - protein, 5 aa, ARTIFICIAL SEQUENCE
  Synthetic Construct
KADLK

SEQ ID NO: 3247 - protein, 5 aa, ARTIFICIAL SEQUENCE
  Synthetic Construct
KADNK

SEQ ID NO: 3248 - protein, 5 aa, ARTIFICIAL SEQUENCE
  Synthetic Construct
KADQK

SEQ ID NO: 3249 - protein, 5 aa, ARTIFICIAL SEQUENCE
  Synthetic Construct
KADRK

SEQ ID NO: 3250 - protein, 5 aa, ARTIFICIAL SEQUENCE
  Synthetic Construct
KADSK

SEQ ID NO: 3251 - protein, 5 aa, ARTIFICIAL SEQUENCE
  Synthetic Construct
KADTK

SEQ ID NO: 3252 - protein, 5 aa, ARTIFICIAL SEQUENCE
  Synthetic Construct
KADYK

SEQ ID NO: 3253 - protein, 5 aa, ARTIFICIAL SEQUENCE
  Synthetic Construct
KAEAK

SEQ ID NO: 3254 - protein, 5 aa, ARTIFICIAL SEQUENCE
  Synthetic Construct
KAEDK

SEQ ID NO: 3255 - protein, 5 aa, ARTIFICIAL SEQUENCE
  Synthetic Construct
KAEEK

SEQ ID NO: 3256 - protein, 5 aa, ARTIFICIAL SEQUENCE
  Synthetic Construct
KAEFK

SEQ ID NO: 3257 - protein, 5 aa, ARTIFICIAL SEQUENCE
  Synthetic Construct
KAEGK

SEQ ID NO: 3258 - protein, 5 aa, ARTIFICIAL SEQUENCE
  Synthetic Construct
KAEHK

SEQ ID NO: 3259 - protein, 5 aa, ARTIFICIAL SEQUENCE
  Synthetic Construct
KAEIK

SEQ ID NO: 3260 - protein, 5 aa, ARTIFICIAL SEQUENCE
  Synthetic Construct
KAELK

SEQ ID NO: 3261 - protein, 5 aa, ARTIFICIAL SEQUENCE
  Synthetic Construct
KAENK

SEQ ID NO: 3262 - protein, 5 aa, ARTIFICIAL SEQUENCE
  Synthetic Construct
KAEQK

SEQ ID NO: 3263 - protein, 5 aa, ARTIFICIAL SEQUENCE
  Synthetic Construct
KAERK

SEQ ID NO: 3264 - protein, 5 aa, ARTIFICIAL SEQUENCE
  Synthetic Construct
KAESK

SEQ ID NO: 3265 - protein, 5 aa, ARTIFICIAL SEQUENCE
  Synthetic Construct
KAETK

SEQ ID NO: 3266 - protein, 5 aa, ARTIFICIAL SEQUENCE
  Synthetic Construct
KAEYK

SEQ ID NO: 3267 - protein, 5 aa, ARTIFICIAL SEQUENCE
  Synthetic Construct
KAFAK

SEQ ID NO: 3268 - protein, 5 aa, ARTIFICIAL SEQUENCE
  Synthetic Construct
KAFDK

SEQ ID NO: 3269 - protein, 5 aa, ARTIFICIAL SEQUENCE
  Synthetic Construct
KAFEK

SEQ ID NO: 3270 - protein, 5 aa, ARTIFICIAL SEQUENCE
  Synthetic Construct
KAFFK

SEQ ID NO: 3271 - protein, 5 aa, ARTIFICIAL SEQUENCE
  Synthetic Construct
KAFGK

SEQ ID NO: 3272 - protein, 5 aa, ARTIFICIAL SEQUENCE
  Synthetic Construct
KAFHK

SEQ ID NO: 3273 - protein, 5 aa, ARTIFICIAL SEQUENCE
  Synthetic Construct
KAFIK

SEQ ID NO: 3274 - protein, 5 aa, ARTIFICIAL SEQUENCE
  Synthetic Construct
KAFLK

SEQ ID NO: 3275 - protein, 5 aa, ARTIFICIAL SEQUENCE
  Synthetic Construct
KAFNK

SEQ ID NO: 3276 - protein, 5 aa, ARTIFICIAL SEQUENCE
  Synthetic Construct
KAFQK

SEQ ID NO: 3277 - protein, 5 aa, ARTIFICIAL SEQUENCE
  Synthetic Construct
KAFRK

SEQ ID NO: 3278 - protein, 5 aa, ARTIFICIAL SEQUENCE
  Synthetic Construct
KAFSK

SEQ ID NO: 3279 - protein, 5 aa, ARTIFICIAL SEQUENCE
  Synthetic Construct
KAFTK

SEQ ID NO: 3280 - protein, 5 aa, ARTIFICIAL SEQUENCE
  Synthetic Construct
KAFYK

SEQ ID NO: 3281 - protein, 5 aa, ARTIFICIAL SEQUENCE
  Synthetic Construct
KAGAK

SEQ ID NO: 3282 - protein, 5 aa, ARTIFICIAL SEQUENCE
  Synthetic Construct
KAGDK

SEQ ID NO: 3283 - protein, 5 aa, ARTIFICIAL SEQUENCE
  Synthetic Construct
KAGEK

SEQ ID NO: 3284 - protein, 5 aa, ARTIFICIAL SEQUENCE
  Synthetic Construct
KAGFK

SEQ ID NO: 3285 - protein, 5 aa, ARTIFICIAL SEQUENCE
  Synthetic Construct
KAGGK

SEQ ID NO: 3286 - protein, 5 aa, ARTIFICIAL SEQUENCE
  Synthetic Construct
KAGHK

SEQ ID NO: 3287 - protein, 5 aa, ARTIFICIAL SEQUENCE
  Synthetic Construct
KAGIK

SEQ ID NO: 3288 - protein, 5 aa, ARTIFICIAL SEQUENCE
  Synthetic Construct
KAGLK

SEQ ID NO: 3289 - protein, 5 aa, ARTIFICIAL SEQUENCE
  Synthetic Construct
KAGNK

SEQ ID NO: 3290 - protein, 5 aa, ARTIFICIAL SEQUENCE
  Synthetic Construct
KAGQK

SEQ ID NO: 3291 - protein, 5 aa, ARTIFICIAL SEQUENCE
  Synthetic Construct
KAGRK

SEQ ID NO: 3292 - protein, 5 aa, ARTIFICIAL SEQUENCE
  Synthetic Construct
KAGSK

SEQ ID NO: 3293 - protein, 5 aa, ARTIFICIAL SEQUENCE
  Synthetic Construct
KAGTK

SEQ ID NO: 3294 - protein, 5 aa, ARTIFICIAL SEQUENCE
  Synthetic Construct
KAGYK

SEQ ID NO: 3295 - protein, 5 aa, ARTIFICIAL SEQUENCE
  Synthetic Construct
KAHAK

SEQ ID NO: 3296 - protein, 5 aa, ARTIFICIAL SEQUENCE
  Synthetic Construct
KAHDK

SEQ ID NO: 3297 - protein, 5 aa, ARTIFICIAL SEQUENCE
  Synthetic Construct
KAHEK

SEQ ID NO: 3298 - protein, 5 aa, ARTIFICIAL SEQUENCE
  Synthetic Construct
KAHFK

SEQ ID NO: 3299 - protein, 5 aa, ARTIFICIAL SEQUENCE
  Synthetic Construct
KAHGK

SEQ ID NO: 3300 - protein, 5 aa, ARTIFICIAL SEQUENCE
  Synthetic Construct
KAHHK

SEQ ID NO: 3301 - protein, 5 aa, ARTIFICIAL SEQUENCE
  Synthetic Construct
KAHIK

SEQ ID NO: 3302 - protein, 5 aa, ARTIFICIAL SEQUENCE
  Synthetic Construct
KAHLK

SEQ ID NO: 3303 - protein, 5 aa, ARTIFICIAL SEQUENCE
  Synthetic Construct
KAHNK

SEQ ID NO: 3304 - protein, 5 aa, ARTIFICIAL SEQUENCE
  Synthetic Construct
KAHQK

SEQ ID NO: 3305 - protein, 5 aa, ARTIFICIAL SEQUENCE
  Synthetic Construct
KAHRK

SEQ ID NO: 3306 - protein, 5 aa, ARTIFICIAL SEQUENCE
  Synthetic Construct
KAHSK

SEQ ID NO: 3307 - protein, 5 aa, ARTIFICIAL SEQUENCE
  Synthetic Construct
KAHTK

SEQ ID NO: 3308 - protein, 5 aa, ARTIFICIAL SEQUENCE
  Synthetic Construct
KAHYK

SEQ ID NO: 3309 - protein, 5 aa, ARTIFICIAL SEQUENCE
  Synthetic Construct
KAIAK

SEQ ID NO: 3310 - protein, 5 aa, ARTIFICIAL SEQUENCE
  Synthetic Construct
KAIDK

SEQ ID NO: 3311 - protein, 5 aa, ARTIFICIAL SEQUENCE
  Synthetic Construct
KAIEK

SEQ ID NO: 3312 - protein, 5 aa, ARTIFICIAL SEQUENCE
  Synthetic Construct
KAIFK

SEQ ID NO: 3313 - protein, 5 aa, ARTIFICIAL SEQUENCE
  Synthetic Construct
KAIGK

SEQ ID NO: 3314 - protein, 5 aa, ARTIFICIAL SEQUENCE
  Synthetic Construct
KAIHK

SEQ ID NO: 3315 - protein, 5 aa, ARTIFICIAL SEQUENCE
  Synthetic Construct
KAIIK

SEQ ID NO: 3316 - protein, 5 aa, ARTIFICIAL SEQUENCE
  Synthetic Construct
KAILK

SEQ ID NO: 3317 - protein, 5 aa, ARTIFICIAL SEQUENCE
  Synthetic Construct
KAINK

SEQ ID NO: 3318 - protein, 5 aa, ARTIFICIAL SEQUENCE
  Synthetic Construct
KAIQK

SEQ ID NO: 3319 - protein, 5 aa, ARTIFICIAL SEQUENCE
  Synthetic Construct
KAIRK

SEQ ID NO: 3320 - protein, 5 aa, ARTIFICIAL SEQUENCE
  Synthetic Construct
KAISK

SEQ ID NO: 3321 - protein, 5 aa, ARTIFICIAL SEQUENCE
  Synthetic Construct
KAITK

SEQ ID NO: 3322 - protein, 5 aa, ARTIFICIAL SEQUENCE
  Synthetic Construct
KAIYK

SEQ ID NO: 3323 - protein, 5 aa, ARTIFICIAL SEQUENCE
  Synthetic Construct
KALAK

SEQ ID NO: 3324 - protein, 5 aa, ARTIFICIAL SEQUENCE
  Synthetic Construct
KALDK

SEQ ID NO: 3325 - protein, 5 aa, ARTIFICIAL SEQUENCE
  Synthetic Construct
KALEK

SEQ ID NO: 3326 - protein, 5 aa, ARTIFICIAL SEQUENCE
  Synthetic Construct
KALFK

SEQ ID NO: 3327 - protein, 5 aa, ARTIFICIAL SEQUENCE
  Synthetic Construct
KALGK

SEQ ID NO: 3328 - protein, 5 aa, ARTIFICIAL SEQUENCE
  Synthetic Construct
KALHK

SEQ ID NO: 3329 - protein, 5 aa, ARTIFICIAL SEQUENCE
  Synthetic Construct
KALIK

SEQ ID NO: 3330 - protein, 5 aa, ARTIFICIAL SEQUENCE
  Synthetic Construct
KALLK

SEQ ID NO: 3331 - protein, 5 aa, ARTIFICIAL SEQUENCE
  Synthetic Construct
KALNK

SEQ ID NO: 3332 - protein, 5 aa, ARTIFICIAL SEQUENCE
  Synthetic Construct
KALQK

SEQ ID NO: 3333 - protein, 5 aa, ARTIFICIAL SEQUENCE
  Synthetic Construct
KALRK

SEQ ID NO: 3334 - protein, 5 aa, ARTIFICIAL SEQUENCE
  Synthetic Construct
KALSK

SEQ ID NO: 3335 - protein, 5 aa, ARTIFICIAL SEQUENCE
  Synthetic Construct
KALTK

SEQ ID NO: 3336 - protein, 5 aa, ARTIFICIAL SEQUENCE
  Synthetic Construct
KALYK

SEQ ID NO: 3337 - protein, 5 aa, ARTIFICIAL SEQUENCE
  Synthetic Construct
KANAK

SEQ ID NO: 3338 - protein, 5 aa, ARTIFICIAL SEQUENCE
  Synthetic Construct
KANDK

SEQ ID NO: 3339 - protein, 5 aa, ARTIFICIAL SEQUENCE
  Synthetic Construct
KANEK

SEQ ID NO: 3340 - protein, 5 aa, ARTIFICIAL SEQUENCE
  Synthetic Construct
KANFK

SEQ ID NO: 3341 - protein, 5 aa, ARTIFICIAL SEQUENCE
  Synthetic Construct
KANGK

SEQ ID NO: 3342 - protein, 5 aa, ARTIFICIAL SEQUENCE
  Synthetic Construct
KANHK

SEQ ID NO: 3343 - protein, 5 aa, ARTIFICIAL SEQUENCE
  Synthetic Construct
KANIK

SEQ ID NO: 3344 - protein, 5 aa, ARTIFICIAL SEQUENCE
  Synthetic Construct
KANLK

SEQ ID NO: 3345 - protein, 5 aa, ARTIFICIAL SEQUENCE
  Synthetic Construct
KANNK

SEQ ID NO: 3346 - protein, 5 aa, ARTIFICIAL SEQUENCE
  Synthetic Construct
KANQK

SEQ ID NO: 3347 - protein, 5 aa, ARTIFICIAL SEQUENCE
  Synthetic Construct
KANRK

SEQ ID NO: 3348 - protein, 5 aa, ARTIFICIAL SEQUENCE
  Synthetic Construct
KANSK

SEQ ID NO: 3349 - protein, 5 aa, ARTIFICIAL SEQUENCE
  Synthetic Construct
KANTK

SEQ ID NO: 3350 - protein, 5 aa, ARTIFICIAL SEQUENCE
  Synthetic Construct
KANYK

SEQ ID NO: 3351 - protein, 5 aa, ARTIFICIAL SEQUENCE
  Synthetic Construct
KAPAK

SEQ ID NO: 3352 - protein, 5 aa, ARTIFICIAL SEQUENCE
  Synthetic Construct
KAPDK

SEQ ID NO: 3353 - protein, 5 aa, ARTIFICIAL SEQUENCE
  Synthetic Construct
KAPEK

SEQ ID NO: 3354 - protein, 5 aa, ARTIFICIAL SEQUENCE
  Synthetic Construct
KAPFK

SEQ ID NO: 3355 - protein, 5 aa, ARTIFICIAL SEQUENCE
  Synthetic Construct
KAPGK

SEQ ID NO: 3356 - protein, 5 aa, ARTIFICIAL SEQUENCE
  Synthetic Construct
KAPHK

SEQ ID NO: 3357 - protein, 5 aa, ARTIFICIAL SEQUENCE
  Synthetic Construct
KAPIK

SEQ ID NO: 3358 - protein, 5 aa, ARTIFICIAL SEQUENCE
  Synthetic Construct
KAPLK

SEQ ID NO: 3359 - protein, 5 aa, ARTIFICIAL SEQUENCE
  Synthetic Construct
KAPNK

SEQ ID NO: 3360 - protein, 5 aa, ARTIFICIAL SEQUENCE
  Synthetic Construct
KAPQK

SEQ ID NO: 3361 - protein, 5 aa, ARTIFICIAL SEQUENCE
  Synthetic Construct
KAPRK

SEQ ID NO: 3362 - protein, 5 aa, ARTIFICIAL SEQUENCE
  Synthetic Construct
KAPSK

SEQ ID NO: 3363 - protein, 5 aa, ARTIFICIAL SEQUENCE
  Synthetic Construct
KAPTK

SEQ ID NO: 3364 - protein, 5 aa, ARTIFICIAL SEQUENCE
  Synthetic Construct
KAPYK

SEQ ID NO: 3365 - protein, 5 aa, ARTIFICIAL SEQUENCE
  Synthetic Construct
KAQAK

SEQ ID NO: 3366 - protein, 5 aa, ARTIFICIAL SEQUENCE
  Synthetic Construct
KAQDK

SEQ ID NO: 3367 - protein, 5 aa, ARTIFICIAL SEQUENCE
  Synthetic Construct
KAQEK

SEQ ID NO: 3368 - protein, 5 aa, ARTIFICIAL SEQUENCE
  Synthetic Construct
KAQFK

SEQ ID NO: 3369 - protein, 5 aa, ARTIFICIAL SEQUENCE
  Synthetic Construct
KAQGK

SEQ ID NO: 3370 - protein, 5 aa, ARTIFICIAL SEQUENCE
  Synthetic Construct
KAQHK

SEQ ID NO: 3371 - protein, 5 aa, ARTIFICIAL SEQUENCE
  Synthetic Construct
KAQIK

SEQ ID NO: 3372 - protein, 5 aa, ARTIFICIAL SEQUENCE
  Synthetic Construct
KAQLK

SEQ ID NO: 3373 - protein, 5 aa, ARTIFICIAL SEQUENCE
  Synthetic Construct
KAQNK

SEQ ID NO: 3374 - protein, 5 aa, ARTIFICIAL SEQUENCE
  Synthetic Construct
KAQQK

SEQ ID NO: 3375 - protein, 5 aa, ARTIFICIAL SEQUENCE
  Synthetic Construct
KAQRK

SEQ ID NO: 3376 - protein, 5 aa, ARTIFICIAL SEQUENCE
  Synthetic Construct
KAQSK

SEQ ID NO: 3377 - protein, 5 aa, ARTIFICIAL SEQUENCE
  Synthetic Construct
KAQTK

SEQ ID NO: 3378 - protein, 5 aa, ARTIFICIAL SEQUENCE
  Synthetic Construct
KAQYK

SEQ ID NO: 3379 - protein, 5 aa, ARTIFICIAL SEQUENCE
  Synthetic Construct
KARAK

SEQ ID NO: 3380 - protein, 5 aa, ARTIFICIAL SEQUENCE
  Synthetic Construct
KARDK

SEQ ID NO: 3381 - protein, 5 aa, ARTIFICIAL SEQUENCE
  Synthetic Construct
KAREK

SEQ ID NO: 3382 - protein, 5 aa, ARTIFICIAL SEQUENCE
  Synthetic Construct
KARFK

SEQ ID NO: 3383 - protein, 5 aa, ARTIFICIAL SEQUENCE
  Synthetic Construct
KARGK

SEQ ID NO: 3384 - protein, 5 aa, ARTIFICIAL SEQUENCE
  Synthetic Construct
KARHK

SEQ ID NO: 3385 - protein, 5 aa, ARTIFICIAL SEQUENCE
  Synthetic Construct
KARIK

SEQ ID NO: 3386 - protein, 5 aa, ARTIFICIAL SEQUENCE
  Synthetic Construct
KARLK

SEQ ID NO: 3387 - protein, 5 aa, ARTIFICIAL SEQUENCE
  Synthetic Construct
KARNK

SEQ ID NO: 3388 - protein, 5 aa, ARTIFICIAL SEQUENCE
  Synthetic Construct
KARQK

SEQ ID NO: 3389 - protein, 5 aa, ARTIFICIAL SEQUENCE
  Synthetic Construct
KARRK

SEQ ID NO: 3390 - protein, 5 aa, ARTIFICIAL SEQUENCE
  Synthetic Construct
KARSK

SEQ ID NO: 3391 - protein, 5 aa, ARTIFICIAL SEQUENCE
  Synthetic Construct
KARTK

SEQ ID NO: 3392 - protein, 5 aa, ARTIFICIAL SEQUENCE
  Synthetic Construct
KARYK

SEQ ID NO: 3393 - protein, 5 aa, ARTIFICIAL SEQUENCE
  Synthetic Construct
KASAK

SEQ ID NO: 3394 - protein, 5 aa, ARTIFICIAL SEQUENCE
  Synthetic Construct
KASDK

SEQ ID NO: 3395 - protein, 5 aa, ARTIFICIAL SEQUENCE
  Synthetic Construct
KASEK

SEQ ID NO: 3396 - protein, 5 aa, ARTIFICIAL SEQUENCE
  Synthetic Construct
KASFK

SEQ ID NO: 3397 - protein, 5 aa, ARTIFICIAL SEQUENCE
  Synthetic Construct
KASGK

SEQ ID NO: 3398 - protein, 5 aa, ARTIFICIAL SEQUENCE
  Synthetic Construct
KASHK

SEQ ID NO: 3399 - protein, 5 aa, ARTIFICIAL SEQUENCE
  Synthetic Construct
KASIK

SEQ ID NO: 3400 - protein, 5 aa, ARTIFICIAL SEQUENCE
  Synthetic Construct
KASLK

SEQ ID NO: 3401 - protein, 5 aa, ARTIFICIAL SEQUENCE
  Synthetic Construct
KASNK

SEQ ID NO: 3402 - protein, 5 aa, ARTIFICIAL SEQUENCE
  Synthetic Construct
KASQK

SEQ ID NO: 3403 - protein, 5 aa, ARTIFICIAL SEQUENCE
  Synthetic Construct
KASRK

SEQ ID NO: 3404 - protein, 5 aa, ARTIFICIAL SEQUENCE
  Synthetic Construct
KASSK

SEQ ID NO: 3405 - protein, 5 aa, ARTIFICIAL SEQUENCE
  Synthetic Construct
KASTK

SEQ ID NO: 3406 - protein, 5 aa, ARTIFICIAL SEQUENCE
  Synthetic Construct
KASYK

SEQ ID NO: 3407 - protein, 5 aa, ARTIFICIAL SEQUENCE
  Synthetic Construct
KATAK

SEQ ID NO: 3408 - protein, 5 aa, ARTIFICIAL SEQUENCE
  Synthetic Construct
KATDK

SEQ ID NO: 3409 - protein, 5 aa, ARTIFICIAL SEQUENCE
  Synthetic Construct
KATEK

SEQ ID NO: 3410 - protein, 5 aa, ARTIFICIAL SEQUENCE
  Synthetic Construct
KATFK

SEQ ID NO: 3411 - protein, 5 aa, ARTIFICIAL SEQUENCE
  Synthetic Construct
KATGK

SEQ ID NO: 3412 - protein, 5 aa, ARTIFICIAL SEQUENCE
  Synthetic Construct
KATHK

SEQ ID NO: 3413 - protein, 5 aa, ARTIFICIAL SEQUENCE
  Synthetic Construct
KATIK

SEQ ID NO: 3414 - protein, 5 aa, ARTIFICIAL SEQUENCE
  Synthetic Construct
KATLK

SEQ ID NO: 3415 - protein, 5 aa, ARTIFICIAL SEQUENCE
  Synthetic Construct
KATNK

SEQ ID NO: 3416 - protein, 5 aa, ARTIFICIAL SEQUENCE
  Synthetic Construct
KATQK

SEQ ID NO: 3417 - protein, 5 aa, ARTIFICIAL SEQUENCE
  Synthetic Construct
KATRK

SEQ ID NO: 3418 - protein, 5 aa, ARTIFICIAL SEQUENCE
  Synthetic Construct
KATSK

SEQ ID NO: 3419 - protein, 5 aa, ARTIFICIAL SEQUENCE
  Synthetic Construct
KATTK

SEQ ID NO: 3420 - protein, 5 aa, ARTIFICIAL SEQUENCE
  Synthetic Construct
KATYK

SEQ ID NO: 3421 - protein, 5 aa, ARTIFICIAL SEQUENCE
  Synthetic Construct
KAYAK

SEQ ID NO: 3422 - protein, 5 aa, ARTIFICIAL SEQUENCE
  Synthetic Construct
KAYDK

SEQ ID NO: 3423 - protein, 5 aa, ARTIFICIAL SEQUENCE
  Synthetic Construct
KAYEK

SEQ ID NO: 3424 - protein, 5 aa, ARTIFICIAL SEQUENCE
  Synthetic Construct
KAYFK

SEQ ID NO: 3425 - protein, 5 aa, ARTIFICIAL SEQUENCE
  Synthetic Construct
KAYGK

SEQ ID NO: 3426 - protein, 5 aa, ARTIFICIAL SEQUENCE
  Synthetic Construct
KAYHK

SEQ ID NO: 3427 - protein, 5 aa, ARTIFICIAL SEQUENCE
  Synthetic Construct
KAYIK

SEQ ID NO: 3428 - protein, 5 aa, ARTIFICIAL SEQUENCE
  Synthetic Construct
KAYLK

SEQ ID NO: 3429 - protein, 5 aa, ARTIFICIAL SEQUENCE
  Synthetic Construct
KAYNK

SEQ ID NO: 3430 - protein, 5 aa, ARTIFICIAL SEQUENCE
  Synthetic Construct
KAYQK

SEQ ID NO: 3431 - protein, 5 aa, ARTIFICIAL SEQUENCE
  Synthetic Construct
KAYRK

SEQ ID NO: 3432 - protein, 5 aa, ARTIFICIAL SEQUENCE
  Synthetic Construct
KAYSK

SEQ ID NO: 3433 - protein, 5 aa, ARTIFICIAL SEQUENCE
  Synthetic Construct
KAYTK

SEQ ID NO: 3434 - protein, 5 aa, ARTIFICIAL SEQUENCE
  Synthetic Construct
KAYYK

SEQ ID NO: 3435 - protein, 5 aa, ARTIFICIAL SEQUENCE
  Synthetic Construct
KDAAK

SEQ ID NO: 3436 - protein, 5 aa, ARTIFICIAL SEQUENCE
  Synthetic Construct
KDADK

SEQ ID NO: 3437 - protein, 5 aa, ARTIFICIAL SEQUENCE
  Synthetic Construct
KDAEK

SEQ ID NO: 3438 - protein, 5 aa, ARTIFICIAL SEQUENCE
  Synthetic Construct
KDAFK

SEQ ID NO: 3439 - protein, 5 aa, ARTIFICIAL SEQUENCE
  Synthetic Construct
KDAGK

SEQ ID NO: 3440 - protein, 5 aa, ARTIFICIAL SEQUENCE
  Synthetic Construct
KDAHK

SEQ ID NO: 3441 - protein, 5 aa, ARTIFICIAL SEQUENCE
  Synthetic Construct
KDAIK

SEQ ID NO: 3442 - protein, 5 aa, ARTIFICIAL SEQUENCE
  Synthetic Construct
KDALK

SEQ ID NO: 3443 - protein, 5 aa, ARTIFICIAL SEQUENCE
  Synthetic Construct
KDANK

SEQ ID NO: 3444 - protein, 5 aa, ARTIFICIAL SEQUENCE
  Synthetic Construct
KDAQK

SEQ ID NO: 3445 - protein, 5 aa, ARTIFICIAL SEQUENCE
  Synthetic Construct
KDARK

SEQ ID NO: 3446 - protein, 5 aa, ARTIFICIAL SEQUENCE
  Synthetic Construct
KDASK

SEQ ID NO: 3447 - protein, 5 aa, ARTIFICIAL SEQUENCE
  Synthetic Construct
KDATK

SEQ ID NO: 3448 - protein, 5 aa, ARTIFICIAL SEQUENCE
  Synthetic Construct
KDAYK

SEQ ID NO: 3449 - protein, 5 aa, ARTIFICIAL SEQUENCE
  Synthetic Construct
KDDAK

SEQ ID NO: 3450 - protein, 5 aa, ARTIFICIAL SEQUENCE
  Synthetic Construct
KDDDK

SEQ ID NO: 3451 - protein, 5 aa, ARTIFICIAL SEQUENCE
  Synthetic Construct
KDDEK

SEQ ID NO: 3452 - protein, 5 aa, ARTIFICIAL SEQUENCE
  Synthetic Construct
KDDFK

SEQ ID NO: 3453 - protein, 5 aa, ARTIFICIAL SEQUENCE
  Synthetic Construct
KDDGK

SEQ ID NO: 3454 - protein, 5 aa, ARTIFICIAL SEQUENCE
  Synthetic Construct
KDDHK

SEQ ID NO: 3455 - protein, 5 aa, ARTIFICIAL SEQUENCE
  Synthetic Construct
KDDIK

SEQ ID NO: 3456 - protein, 5 aa, ARTIFICIAL SEQUENCE
  Synthetic Construct
KDDLK

SEQ ID NO: 3457 - protein, 5 aa, ARTIFICIAL SEQUENCE
  Synthetic Construct
KDDNK

SEQ ID NO: 3458 - protein, 5 aa, ARTIFICIAL SEQUENCE
  Synthetic Construct
KDDQK

SEQ ID NO: 3459 - protein, 5 aa, ARTIFICIAL SEQUENCE
  Synthetic Construct
KDDRK

SEQ ID NO: 3460 - protein, 5 aa, ARTIFICIAL SEQUENCE
  Synthetic Construct
KDDSK

SEQ ID NO: 3461 - protein, 5 aa, ARTIFICIAL SEQUENCE
  Synthetic Construct
KDDTK

SEQ ID NO: 3462 - protein, 5 aa, ARTIFICIAL SEQUENCE
  Synthetic Construct
KDDYK

SEQ ID NO: 3463 - protein, 5 aa, ARTIFICIAL SEQUENCE
  Synthetic Construct
KDEAK

SEQ ID NO: 3464 - protein, 5 aa, ARTIFICIAL SEQUENCE
  Synthetic Construct
KDEDK

SEQ ID NO: 3465 - protein, 5 aa, ARTIFICIAL SEQUENCE
  Synthetic Construct
KDEEK

SEQ ID NO: 3466 - protein, 5 aa, ARTIFICIAL SEQUENCE
  Synthetic Construct
KDEFK

SEQ ID NO: 3467 - protein, 5 aa, ARTIFICIAL SEQUENCE
  Synthetic Construct
KDEGK

SEQ ID NO: 3468 - protein, 5 aa, ARTIFICIAL SEQUENCE
  Synthetic Construct
KDEHK

SEQ ID NO: 3469 - protein, 5 aa, ARTIFICIAL SEQUENCE
  Synthetic Construct
KDEIK

SEQ ID NO: 3470 - protein, 5 aa, ARTIFICIAL SEQUENCE
  Synthetic Construct
KDELK

SEQ ID NO: 3471 - protein, 5 aa, ARTIFICIAL SEQUENCE
  Synthetic Construct
KDENK

SEQ ID NO: 3472 - protein, 5 aa, ARTIFICIAL SEQUENCE
  Synthetic Construct
KDEQK

SEQ ID NO: 3473 - protein, 5 aa, ARTIFICIAL SEQUENCE
  Synthetic Construct
KDERK

SEQ ID NO: 3474 - protein, 5 aa, ARTIFICIAL SEQUENCE
  Synthetic Construct
KDESK

SEQ ID NO: 3475 - protein, 5 aa, ARTIFICIAL SEQUENCE
  Synthetic Construct
KDETK

SEQ ID NO: 3476 - protein, 5 aa, ARTIFICIAL SEQUENCE
  Synthetic Construct
KDEYK

SEQ ID NO: 3477 - protein, 5 aa, ARTIFICIAL SEQUENCE
  Synthetic Construct
KDFAK

SEQ ID NO: 3478 - protein, 5 aa, ARTIFICIAL SEQUENCE
  Synthetic Construct
KDFDK

SEQ ID NO: 3479 - protein, 5 aa, ARTIFICIAL SEQUENCE
  Synthetic Construct
KDFEK

SEQ ID NO: 3480 - protein, 5 aa, ARTIFICIAL SEQUENCE
  Synthetic Construct
KDFFK

SEQ ID NO: 3481 - protein, 5 aa, ARTIFICIAL SEQUENCE
  Synthetic Construct
KDFGK

SEQ ID NO: 3482 - protein, 5 aa, ARTIFICIAL SEQUENCE
  Synthetic Construct
KDFHK

SEQ ID NO: 3483 - protein, 5 aa, ARTIFICIAL SEQUENCE
  Synthetic Construct
KDFIK

SEQ ID NO: 3484 - protein, 5 aa, ARTIFICIAL SEQUENCE
  Synthetic Construct
KDFLK

SEQ ID NO: 3485 - protein, 5 aa, ARTIFICIAL SEQUENCE
  Synthetic Construct
KDFNK

SEQ ID NO: 3486 - protein, 5 aa, ARTIFICIAL SEQUENCE
  Synthetic Construct
KDFQK

SEQ ID NO: 3487 - protein, 5 aa, ARTIFICIAL SEQUENCE
  Synthetic Construct
KDFRK

SEQ ID NO: 3488 - protein, 5 aa, ARTIFICIAL SEQUENCE
  Synthetic Construct
KDFSK

SEQ ID NO: 3489 - protein, 5 aa, ARTIFICIAL SEQUENCE
  Synthetic Construct
KDFTK

SEQ ID NO: 3490 - protein, 5 aa, ARTIFICIAL SEQUENCE
  Synthetic Construct
KDFYK

SEQ ID NO: 3491 - protein, 5 aa, ARTIFICIAL SEQUENCE
  Synthetic Construct
KDGAK

SEQ ID NO: 3492 - protein, 5 aa, ARTIFICIAL SEQUENCE
  Synthetic Construct
KDGDK

SEQ ID NO: 3493 - protein, 5 aa, ARTIFICIAL SEQUENCE
  Synthetic Construct
KDGEK

SEQ ID NO: 3494 - protein, 5 aa, ARTIFICIAL SEQUENCE
  Synthetic Construct
KDGFK

SEQ ID NO: 3495 - protein, 5 aa, ARTIFICIAL SEQUENCE
  Synthetic Construct
KDGGK

SEQ ID NO: 3496 - protein, 5 aa, ARTIFICIAL SEQUENCE
  Synthetic Construct
KDGHK

SEQ ID NO: 3497 - protein, 5 aa, ARTIFICIAL SEQUENCE
  Synthetic Construct
KDGIK

SEQ ID NO: 3498 - protein, 5 aa, ARTIFICIAL SEQUENCE
  Synthetic Construct
KDGLK

SEQ ID NO: 3499 - protein, 5 aa, ARTIFICIAL SEQUENCE
  Synthetic Construct
KDGNK

SEQ ID NO: 3500 - protein, 5 aa, ARTIFICIAL SEQUENCE
  Synthetic Construct
KDGQK

SEQ ID NO: 3501 - protein, 5 aa, ARTIFICIAL SEQUENCE
  Synthetic Construct
KDGRK

SEQ ID NO: 3502 - protein, 5 aa, ARTIFICIAL SEQUENCE
  Synthetic Construct
KDGSK

SEQ ID NO: 3503 - protein, 5 aa, ARTIFICIAL SEQUENCE
  Synthetic Construct
KDGTK

SEQ ID NO: 3504 - protein, 5 aa, ARTIFICIAL SEQUENCE
  Synthetic Construct
KDGYK

SEQ ID NO: 3505 - protein, 5 aa, ARTIFICIAL SEQUENCE
  Synthetic Construct
KDHAK

SEQ ID NO: 3506 - protein, 5 aa, ARTIFICIAL SEQUENCE
  Synthetic Construct
KDHDK

SEQ ID NO: 3507 - protein, 5 aa, ARTIFICIAL SEQUENCE
  Synthetic Construct
KDHEK

SEQ ID NO: 3508 - protein, 5 aa, ARTIFICIAL SEQUENCE
  Synthetic Construct
KDHFK

SEQ ID NO: 3509 - protein, 5 aa, ARTIFICIAL SEQUENCE
  Synthetic Construct
KDHGK

SEQ ID NO: 3510 - protein, 5 aa, ARTIFICIAL SEQUENCE
  Synthetic Construct
KDHHK

SEQ ID NO: 3511 - protein, 5 aa, ARTIFICIAL SEQUENCE
  Synthetic Construct
KDHIK

SEQ ID NO: 3512 - protein, 5 aa, ARTIFICIAL SEQUENCE
  Synthetic Construct
KDHLK

SEQ ID NO: 3513 - protein, 5 aa, ARTIFICIAL SEQUENCE
  Synthetic Construct
KDHNK

SEQ ID NO: 3514 - protein, 5 aa, ARTIFICIAL SEQUENCE
  Synthetic Construct
KDHQK

SEQ ID NO: 3515 - protein, 5 aa, ARTIFICIAL SEQUENCE
  Synthetic Construct
KDHRK

SEQ ID NO: 3516 - protein, 5 aa, ARTIFICIAL SEQUENCE
  Synthetic Construct
KDHSK

SEQ ID NO: 3517 - protein, 5 aa, ARTIFICIAL SEQUENCE
  Synthetic Construct
KDHTK

SEQ ID NO: 3518 - protein, 5 aa, ARTIFICIAL SEQUENCE
  Synthetic Construct
KDHYK

SEQ ID NO: 3519 - protein, 5 aa, ARTIFICIAL SEQUENCE
  Synthetic Construct
KDIAK

SEQ ID NO: 3520 - protein, 5 aa, ARTIFICIAL SEQUENCE
  Synthetic Construct
KDIDK

SEQ ID NO: 3521 - protein, 5 aa, ARTIFICIAL SEQUENCE
  Synthetic Construct
KDIEK

SEQ ID NO: 3522 - protein, 5 aa, ARTIFICIAL SEQUENCE
  Synthetic Construct
KDIFK

SEQ ID NO: 3523 - protein, 5 aa, ARTIFICIAL SEQUENCE
  Synthetic Construct
KDIGK

SEQ ID NO: 3524 - protein, 5 aa, ARTIFICIAL SEQUENCE
  Synthetic Construct
KDIHK

SEQ ID NO: 3525 - protein, 5 aa, ARTIFICIAL SEQUENCE
  Synthetic Construct
KDIIK

SEQ ID NO: 3526 - protein, 5 aa, ARTIFICIAL SEQUENCE
  Synthetic Construct
KDILK

SEQ ID NO: 3527 - protein, 5 aa, ARTIFICIAL SEQUENCE
  Synthetic Construct
KDINK

SEQ ID NO: 3528 - protein, 5 aa, ARTIFICIAL SEQUENCE
  Synthetic Construct
KDIQK

SEQ ID NO: 3529 - protein, 5 aa, ARTIFICIAL SEQUENCE
  Synthetic Construct
KDIRK

SEQ ID NO: 3530 - protein, 5 aa, ARTIFICIAL SEQUENCE
  Synthetic Construct
KDISK

SEQ ID NO: 3531 - protein, 5 aa, ARTIFICIAL SEQUENCE
  Synthetic Construct
KDITK

SEQ ID NO: 3532 - protein, 5 aa, ARTIFICIAL SEQUENCE
  Synthetic Construct
KDIYK

SEQ ID NO: 3533 - protein, 5 aa, ARTIFICIAL SEQUENCE
  Synthetic Construct
KDLAK

SEQ ID NO: 3534 - protein, 5 aa, ARTIFICIAL SEQUENCE
  Synthetic Construct
KDLDK

SEQ ID NO: 3535 - protein, 5 aa, ARTIFICIAL SEQUENCE
  Synthetic Construct
KDLEK

SEQ ID NO: 3536 - protein, 5 aa, ARTIFICIAL SEQUENCE
  Synthetic Construct
KDLFK

SEQ ID NO: 3537 - protein, 5 aa, ARTIFICIAL SEQUENCE
  Synthetic Construct
KDLGK

SEQ ID NO: 3538 - protein, 5 aa, ARTIFICIAL SEQUENCE
  Synthetic Construct
KDLHK

SEQ ID NO: 3539 - protein, 5 aa, ARTIFICIAL SEQUENCE
  Synthetic Construct
KDLIK

SEQ ID NO: 3540 - protein, 5 aa, ARTIFICIAL SEQUENCE
  Synthetic Construct
KDLLK

SEQ ID NO: 3541 - protein, 5 aa, ARTIFICIAL SEQUENCE
  Synthetic Construct
KDLNK

SEQ ID NO: 3542 - protein, 5 aa, ARTIFICIAL SEQUENCE
  Synthetic Construct
KDLQK

SEQ ID NO: 3543 - protein, 5 aa, ARTIFICIAL SEQUENCE
  Synthetic Construct
KDLRK

SEQ ID NO: 3544 - protein, 5 aa, ARTIFICIAL SEQUENCE
  Synthetic Construct
KDLSK

SEQ ID NO: 3545 - protein, 5 aa, ARTIFICIAL SEQUENCE
  Synthetic Construct
KDLTK

SEQ ID NO: 3546 - protein, 5 aa, ARTIFICIAL SEQUENCE
  Synthetic Construct
KDLYK

SEQ ID NO: 3547 - protein, 5 aa, ARTIFICIAL SEQUENCE
  Synthetic Construct
KDNAK

SEQ ID NO: 3548 - protein, 5 aa, ARTIFICIAL SEQUENCE
  Synthetic Construct
KDNDK

SEQ ID NO: 3549 - protein, 5 aa, ARTIFICIAL SEQUENCE
  Synthetic Construct
KDNEK

SEQ ID NO: 3550 - protein, 5 aa, ARTIFICIAL SEQUENCE
  Synthetic Construct
KDNFK

SEQ ID NO: 3551 - protein, 5 aa, ARTIFICIAL SEQUENCE
  Synthetic Construct
KDNGK

SEQ ID NO: 3552 - protein, 5 aa, ARTIFICIAL SEQUENCE
  Synthetic Construct
KDNHK

SEQ ID NO: 3553 - protein, 5 aa, ARTIFICIAL SEQUENCE
  Synthetic Construct
KDNIK

SEQ ID NO: 3554 - protein, 5 aa, ARTIFICIAL SEQUENCE
  Synthetic Construct
KDNLK

SEQ ID NO: 3555 - protein, 5 aa, ARTIFICIAL SEQUENCE
  Synthetic Construct
KDNNK

SEQ ID NO: 3556 - protein, 5 aa, ARTIFICIAL SEQUENCE
  Synthetic Construct
KDNQK

SEQ ID NO: 3557 - protein, 5 aa, ARTIFICIAL SEQUENCE
  Synthetic Construct
KDNRK

SEQ ID NO: 3558 - protein, 5 aa, ARTIFICIAL SEQUENCE
  Synthetic Construct
KDNSK

SEQ ID NO: 3559 - protein, 5 aa, ARTIFICIAL SEQUENCE
  Synthetic Construct
KDNTK

SEQ ID NO: 3560 - protein, 5 aa, ARTIFICIAL SEQUENCE
  Synthetic Construct
KDNYK

SEQ ID NO: 3561 - protein, 5 aa, ARTIFICIAL SEQUENCE
  Synthetic Construct
KDPAK

SEQ ID NO: 3562 - protein, 5 aa, ARTIFICIAL SEQUENCE
  Synthetic Construct
KDPDK

SEQ ID NO: 3563 - protein, 5 aa, ARTIFICIAL SEQUENCE
  Synthetic Construct
KDPEK

SEQ ID NO: 3564 - protein, 5 aa, ARTIFICIAL SEQUENCE
  Synthetic Construct
KDPFK

SEQ ID NO: 3565 - protein, 5 aa, ARTIFICIAL SEQUENCE
  Synthetic Construct
KDPGK

SEQ ID NO: 3566 - protein, 5 aa, ARTIFICIAL SEQUENCE
  Synthetic Construct
KDPHK

SEQ ID NO: 3567 - protein, 5 aa, ARTIFICIAL SEQUENCE
  Synthetic Construct
KDPIK

SEQ ID NO: 3568 - protein, 5 aa, ARTIFICIAL SEQUENCE
  Synthetic Construct
KDPLK

SEQ ID NO: 3569 - protein, 5 aa, ARTIFICIAL SEQUENCE
  Synthetic Construct
KDPNK

SEQ ID NO: 3570 - protein, 5 aa, ARTIFICIAL SEQUENCE
  Synthetic Construct
KDPQK

SEQ ID NO: 3571 - protein, 5 aa, ARTIFICIAL SEQUENCE
  Synthetic Construct
KDPRK

SEQ ID NO: 3572 - protein, 5 aa, ARTIFICIAL SEQUENCE
  Synthetic Construct
KDPSK

SEQ ID NO: 3573 - protein, 5 aa, ARTIFICIAL SEQUENCE
  Synthetic Construct
KDPTK

SEQ ID NO: 3574 - protein, 5 aa, ARTIFICIAL SEQUENCE
  Synthetic Construct
KDPYK

SEQ ID NO: 3575 - protein, 5 aa, ARTIFICIAL SEQUENCE
  Synthetic Construct
KDQAK

SEQ ID NO: 3576 - protein, 5 aa, ARTIFICIAL SEQUENCE
  Synthetic Construct
KDQDK

SEQ ID NO: 3577 - protein, 5 aa, ARTIFICIAL SEQUENCE
  Synthetic Construct
KDQEK

SEQ ID NO: 3578 - protein, 5 aa, ARTIFICIAL SEQUENCE
  Synthetic Construct
KDQFK

SEQ ID NO: 3579 - protein, 5 aa, ARTIFICIAL SEQUENCE
  Synthetic Construct
KDQGK

SEQ ID NO: 3580 - protein, 5 aa, ARTIFICIAL SEQUENCE
  Synthetic Construct
KDQHK

SEQ ID NO: 3581 - protein, 5 aa, ARTIFICIAL SEQUENCE
  Synthetic Construct
KDQIK

SEQ ID NO: 3582 - protein, 5 aa, ARTIFICIAL SEQUENCE
  Synthetic Construct
KDQLK

SEQ ID NO: 3583 - protein, 5 aa, ARTIFICIAL SEQUENCE
  Synthetic Construct
KDQNK

SEQ ID NO: 3584 - protein, 5 aa, ARTIFICIAL SEQUENCE
  Synthetic Construct
KDQQK

SEQ ID NO: 3585 - protein, 5 aa, ARTIFICIAL SEQUENCE
  Synthetic Construct
KDQRK

SEQ ID NO: 3586 - protein, 5 aa, ARTIFICIAL SEQUENCE
  Synthetic Construct
KDQSK

SEQ ID NO: 3587 - protein, 5 aa, ARTIFICIAL SEQUENCE
  Synthetic Construct
KDQTK

SEQ ID NO: 3588 - protein, 5 aa, ARTIFICIAL SEQUENCE
  Synthetic Construct
KDQYK

SEQ ID NO: 3589 - protein, 5 aa, ARTIFICIAL SEQUENCE
  Synthetic Construct
KDRAK

SEQ ID NO: 3590 - protein, 5 aa, ARTIFICIAL SEQUENCE
  Synthetic Construct
KDRDK

SEQ ID NO: 3591 - protein, 5 aa, ARTIFICIAL SEQUENCE
  Synthetic Construct
KDREK

SEQ ID NO: 3592 - protein, 5 aa, ARTIFICIAL SEQUENCE
  Synthetic Construct
KDRFK

SEQ ID NO: 3593 - protein, 5 aa, ARTIFICIAL SEQUENCE
  Synthetic Construct
KDRGK

SEQ ID NO: 3594 - protein, 5 aa, ARTIFICIAL SEQUENCE
  Synthetic Construct
KDRHK

SEQ ID NO: 3595 - protein, 5 aa, ARTIFICIAL SEQUENCE
  Synthetic Construct
KDRIK

SEQ ID NO: 3596 - protein, 5 aa, ARTIFICIAL SEQUENCE
  Synthetic Construct
KDRLK

SEQ ID NO: 3597 - protein, 5 aa, ARTIFICIAL SEQUENCE
  Synthetic Construct
KDRNK

SEQ ID NO: 3598 - protein, 5 aa, ARTIFICIAL SEQUENCE
  Synthetic Construct
KDRQK

SEQ ID NO: 3599 - protein, 5 aa, ARTIFICIAL SEQUENCE
  Synthetic Construct
KDRRK

SEQ ID NO: 3600 - protein, 5 aa, ARTIFICIAL SEQUENCE
  Synthetic Construct
KDRSK

SEQ ID NO: 3601 - protein, 5 aa, ARTIFICIAL SEQUENCE
  Synthetic Construct
KDRTK

SEQ ID NO: 3602 - protein, 5 aa, ARTIFICIAL SEQUENCE
  Synthetic Construct
KDRYK

SEQ ID NO: 3603 - protein, 5 aa, ARTIFICIAL SEQUENCE
  Synthetic Construct
KDSAK

SEQ ID NO: 3604 - protein, 5 aa, ARTIFICIAL SEQUENCE
  Synthetic Construct
KDSDK

SEQ ID NO: 3605 - protein, 5 aa, ARTIFICIAL SEQUENCE
  Synthetic Construct
KDSEK

SEQ ID NO: 3606 - protein, 5 aa, ARTIFICIAL SEQUENCE
  Synthetic Construct
KDSFK

SEQ ID NO: 3607 - protein, 5 aa, ARTIFICIAL SEQUENCE
  Synthetic Construct
KDSGK

SEQ ID NO: 3608 - protein, 5 aa, ARTIFICIAL SEQUENCE
  Synthetic Construct
KDSHK

SEQ ID NO: 3609 - protein, 5 aa, ARTIFICIAL SEQUENCE
  Synthetic Construct
KDSIK

SEQ ID NO: 3610 - protein, 5 aa, ARTIFICIAL SEQUENCE
  Synthetic Construct
KDSLK

SEQ ID NO: 3611 - protein, 5 aa, ARTIFICIAL SEQUENCE
  Synthetic Construct
KDSNK

SEQ ID NO: 3612 - protein, 5 aa, ARTIFICIAL SEQUENCE
  Synthetic Construct
KDSQK

SEQ ID NO: 3613 - protein, 5 aa, ARTIFICIAL SEQUENCE
  Synthetic Construct
KDSRK

SEQ ID NO: 3614 - protein, 5 aa, ARTIFICIAL SEQUENCE
  Synthetic Construct
KDSSK

SEQ ID NO: 3615 - protein, 5 aa, ARTIFICIAL SEQUENCE
  Synthetic Construct
KDSTK

SEQ ID NO: 3616 - protein, 5 aa, ARTIFICIAL SEQUENCE
  Synthetic Construct
KDSYK

SEQ ID NO: 3617 - protein, 5 aa, ARTIFICIAL SEQUENCE
  Synthetic Construct
KDTAK

SEQ ID NO: 3618 - protein, 5 aa, ARTIFICIAL SEQUENCE
  Synthetic Construct
KDTDK

SEQ ID NO: 3619 - protein, 5 aa, ARTIFICIAL SEQUENCE
  Synthetic Construct
KDTEK

SEQ ID NO: 3620 - protein, 5 aa, ARTIFICIAL SEQUENCE
  Synthetic Construct
KDTFK

SEQ ID NO: 3621 - protein, 5 aa, ARTIFICIAL SEQUENCE
  Synthetic Construct
KDTGK

SEQ ID NO: 3622 - protein, 5 aa, ARTIFICIAL SEQUENCE
  Synthetic Construct
KDTHK

SEQ ID NO: 3623 - protein, 5 aa, ARTIFICIAL SEQUENCE
  Synthetic Construct
KDTIK

SEQ ID NO: 3624 - protein, 5 aa, ARTIFICIAL SEQUENCE
  Synthetic Construct
KDTLK

SEQ ID NO: 3625 - protein, 5 aa, ARTIFICIAL SEQUENCE
  Synthetic Construct
KDTNK

SEQ ID NO: 3626 - protein, 5 aa, ARTIFICIAL SEQUENCE
  Synthetic Construct
KDTQK

SEQ ID NO: 3627 - protein, 5 aa, ARTIFICIAL SEQUENCE
  Synthetic Construct
KDTRK

SEQ ID NO: 3628 - protein, 5 aa, ARTIFICIAL SEQUENCE
  Synthetic Construct
KDTSK

SEQ ID NO: 3629 - protein, 5 aa, ARTIFICIAL SEQUENCE
  Synthetic Construct
KDTTK

SEQ ID NO: 3630 - protein, 5 aa, ARTIFICIAL SEQUENCE
  Synthetic Construct
KDTYK

SEQ ID NO: 3631 - protein, 5 aa, ARTIFICIAL SEQUENCE
  Synthetic Construct
KDYAK

SEQ ID NO: 3632 - protein, 5 aa, ARTIFICIAL SEQUENCE
  Synthetic Construct
KDYDK

SEQ ID NO: 3633 - protein, 5 aa, ARTIFICIAL SEQUENCE
  Synthetic Construct
KDYEK

SEQ ID NO: 3634 - protein, 5 aa, ARTIFICIAL SEQUENCE
  Synthetic Construct
KDYFK

SEQ ID NO: 3635 - protein, 5 aa, ARTIFICIAL SEQUENCE
  Synthetic Construct
KDYGK

SEQ ID NO: 3636 - protein, 5 aa, ARTIFICIAL SEQUENCE
  Synthetic Construct
KDYHK

SEQ ID NO: 3637 - protein, 5 aa, ARTIFICIAL SEQUENCE
  Synthetic Construct
KDYIK

SEQ ID NO: 3638 - protein, 5 aa, ARTIFICIAL SEQUENCE
  Synthetic Construct
KDYLK

SEQ ID NO: 3639 - protein, 5 aa, ARTIFICIAL SEQUENCE
  Synthetic Construct
KDYNK

SEQ ID NO: 3640 - protein, 5 aa, ARTIFICIAL SEQUENCE
  Synthetic Construct
KDYQK

SEQ ID NO: 3641 - protein, 5 aa, ARTIFICIAL SEQUENCE
  Synthetic Construct
KDYRK

SEQ ID NO: 3642 - protein, 5 aa, ARTIFICIAL SEQUENCE
  Synthetic Construct
KDYSK

SEQ ID NO: 3643 - protein, 5 aa, ARTIFICIAL SEQUENCE
  Synthetic Construct
KDYTK

SEQ ID NO: 3644 - protein, 5 aa, ARTIFICIAL SEQUENCE
  Synthetic Construct
KDYYK

SEQ ID NO: 3645 - protein, 5 aa, ARTIFICIAL SEQUENCE
  Synthetic Construct
KEAAK

SEQ ID NO: 3646 - protein, 5 aa, ARTIFICIAL SEQUENCE
  Synthetic Construct
KEADK

SEQ ID NO: 3647 - protein, 5 aa, ARTIFICIAL SEQUENCE
  Synthetic Construct
KEAEK

SEQ ID NO: 3648 - protein, 5 aa, ARTIFICIAL SEQUENCE
  Synthetic Construct
KEAFK

SEQ ID NO: 3649 - protein, 5 aa, ARTIFICIAL SEQUENCE
  Synthetic Construct
KEAGK

SEQ ID NO: 3650 - protein, 5 aa, ARTIFICIAL SEQUENCE
  Synthetic Construct
KEAHK

SEQ ID NO: 3651 - protein, 5 aa, ARTIFICIAL SEQUENCE
  Synthetic Construct
KEAIK

SEQ ID NO: 3652 - protein, 5 aa, ARTIFICIAL SEQUENCE
  Synthetic Construct
KEALK

SEQ ID NO: 3653 - protein, 5 aa, ARTIFICIAL SEQUENCE
  Synthetic Construct
KEANK

SEQ ID NO: 3654 - protein, 5 aa, ARTIFICIAL SEQUENCE
  Synthetic Construct
KEAQK

SEQ ID NO: 3655 - protein, 5 aa, ARTIFICIAL SEQUENCE
  Synthetic Construct
KEARK

SEQ ID NO: 3656 - protein, 5 aa, ARTIFICIAL SEQUENCE
  Synthetic Construct
KEASK

SEQ ID NO: 3657 - protein, 5 aa, ARTIFICIAL SEQUENCE
  Synthetic Construct
KEATK

SEQ ID NO: 3658 - protein, 5 aa, ARTIFICIAL SEQUENCE
  Synthetic Construct
KEAYK

SEQ ID NO: 3659 - protein, 5 aa, ARTIFICIAL SEQUENCE
  Synthetic Construct
KEDAK

SEQ ID NO: 3660 - protein, 5 aa, ARTIFICIAL SEQUENCE
  Synthetic Construct
KEDDK

SEQ ID NO: 3661 - protein, 5 aa, ARTIFICIAL SEQUENCE
  Synthetic Construct
KEDEK

SEQ ID NO: 3662 - protein, 5 aa, ARTIFICIAL SEQUENCE
  Synthetic Construct
KEDFK

SEQ ID NO: 3663 - protein, 5 aa, ARTIFICIAL SEQUENCE
  Synthetic Construct
KEDGK

SEQ ID NO: 3664 - protein, 5 aa, ARTIFICIAL SEQUENCE
  Synthetic Construct
KEDHK

SEQ ID NO: 3665 - protein, 5 aa, ARTIFICIAL SEQUENCE
  Synthetic Construct
KEDIK

SEQ ID NO: 3666 - protein, 5 aa, ARTIFICIAL SEQUENCE
  Synthetic Construct
KEDLK

SEQ ID NO: 3667 - protein, 5 aa, ARTIFICIAL SEQUENCE
  Synthetic Construct
KEDNK

SEQ ID NO: 3668 - protein, 5 aa, ARTIFICIAL SEQUENCE
  Synthetic Construct
KEDQK

SEQ ID NO: 3669 - protein, 5 aa, ARTIFICIAL SEQUENCE
  Synthetic Construct
KEDRK

SEQ ID NO: 3670 - protein, 5 aa, ARTIFICIAL SEQUENCE
  Synthetic Construct
KEDSK

SEQ ID NO: 3671 - protein, 5 aa, ARTIFICIAL SEQUENCE
  Synthetic Construct
KEDTK

SEQ ID NO: 3672 - protein, 5 aa, ARTIFICIAL SEQUENCE
  Synthetic Construct
KEDYK

SEQ ID NO: 3673 - protein, 5 aa, ARTIFICIAL SEQUENCE
  Synthetic Construct
KEEAK

SEQ ID NO: 3674 - protein, 5 aa, ARTIFICIAL SEQUENCE
  Synthetic Construct
KEEDK

SEQ ID NO: 3675 - protein, 5 aa, ARTIFICIAL SEQUENCE
  Synthetic Construct
KEEEK

SEQ ID NO: 3676 - protein, 5 aa, ARTIFICIAL SEQUENCE
  Synthetic Construct
KEEFK

SEQ ID NO: 3677 - protein, 5 aa, ARTIFICIAL SEQUENCE
  Synthetic Construct
KEEGK

SEQ ID NO: 3678 - protein, 5 aa, ARTIFICIAL SEQUENCE
  Synthetic Construct
KEEHK

SEQ ID NO: 3679 - protein, 5 aa, ARTIFICIAL SEQUENCE
  Synthetic Construct
KEEIK

SEQ ID NO: 3680 - protein, 5 aa, ARTIFICIAL SEQUENCE
  Synthetic Construct
KEELK

SEQ ID NO: 3681 - protein, 5 aa, ARTIFICIAL SEQUENCE
  Synthetic Construct
KEENK

SEQ ID NO: 3682 - protein, 5 aa, ARTIFICIAL SEQUENCE
  Synthetic Construct
KEEQK

SEQ ID NO: 3683 - protein, 5 aa, ARTIFICIAL SEQUENCE
  Synthetic Construct
KEERK

SEQ ID NO: 3684 - protein, 5 aa, ARTIFICIAL SEQUENCE
  Synthetic Construct
KEESK

SEQ ID NO: 3685 - protein, 5 aa, ARTIFICIAL SEQUENCE
  Synthetic Construct
KEETK

SEQ ID NO: 3686 - protein, 5 aa, ARTIFICIAL SEQUENCE
  Synthetic Construct
KEEYK

SEQ ID NO: 3687 - protein, 5 aa, ARTIFICIAL SEQUENCE
  Synthetic Construct
KEFAK

SEQ ID NO: 3688 - protein, 5 aa, ARTIFICIAL SEQUENCE
  Synthetic Construct
KEFDK

SEQ ID NO: 3689 - protein, 5 aa, ARTIFICIAL SEQUENCE
  Synthetic Construct
KEFEK

SEQ ID NO: 3690 - protein, 5 aa, ARTIFICIAL SEQUENCE
  Synthetic Construct
KEFFK

SEQ ID NO: 3691 - protein, 5 aa, ARTIFICIAL SEQUENCE
  Synthetic Construct
KEFGK

SEQ ID NO: 3692 - protein, 5 aa, ARTIFICIAL SEQUENCE
  Synthetic Construct
KEFHK

SEQ ID NO: 3693 - protein, 5 aa, ARTIFICIAL SEQUENCE
  Synthetic Construct
KEFIK

SEQ ID NO: 3694 - protein, 5 aa, ARTIFICIAL SEQUENCE
  Synthetic Construct
KEFLK

SEQ ID NO: 3695 - protein, 5 aa, ARTIFICIAL SEQUENCE
  Synthetic Construct
KEFNK

SEQ ID NO: 3696 - protein, 5 aa, ARTIFICIAL SEQUENCE
  Synthetic Construct
KEFQK

SEQ ID NO: 3697 - protein, 5 aa, ARTIFICIAL SEQUENCE
  Synthetic Construct
KEFRK

SEQ ID NO: 3698 - protein, 5 aa, ARTIFICIAL SEQUENCE
  Synthetic Construct
KEFSK

SEQ ID NO: 3699 - protein, 5 aa, ARTIFICIAL SEQUENCE
  Synthetic Construct
KEFTK

SEQ ID NO: 3700 - protein, 5 aa, ARTIFICIAL SEQUENCE
  Synthetic Construct
KEFYK

SEQ ID NO: 3701 - protein, 5 aa, ARTIFICIAL SEQUENCE
  Synthetic Construct
KEGAK

SEQ ID NO: 3702 - protein, 5 aa, ARTIFICIAL SEQUENCE
  Synthetic Construct
KEGDK

SEQ ID NO: 3703 - protein, 5 aa, ARTIFICIAL SEQUENCE
  Synthetic Construct
KEGEK

SEQ ID NO: 3704 - protein, 5 aa, ARTIFICIAL SEQUENCE
  Synthetic Construct
KEGFK

SEQ ID NO: 3705 - protein, 5 aa, ARTIFICIAL SEQUENCE
  Synthetic Construct
KEGGK

SEQ ID NO: 3706 - protein, 5 aa, ARTIFICIAL SEQUENCE
  Synthetic Construct
KEGHK

SEQ ID NO: 3707 - protein, 5 aa, ARTIFICIAL SEQUENCE
  Synthetic Construct
KEGIK

SEQ ID NO: 3708 - protein, 5 aa, ARTIFICIAL SEQUENCE
  Synthetic Construct
KEGLK

SEQ ID NO: 3709 - protein, 5 aa, ARTIFICIAL SEQUENCE
  Synthetic Construct
KEGNK

SEQ ID NO: 3710 - protein, 5 aa, ARTIFICIAL SEQUENCE
  Synthetic Construct
KEGQK

SEQ ID NO: 3711 - protein, 5 aa, ARTIFICIAL SEQUENCE
  Synthetic Construct
KEGRK

SEQ ID NO: 3712 - protein, 5 aa, ARTIFICIAL SEQUENCE
  Synthetic Construct
KEGSK

SEQ ID NO: 3713 - protein, 5 aa, ARTIFICIAL SEQUENCE
  Synthetic Construct
KEGTK

SEQ ID NO: 3714 - protein, 5 aa, ARTIFICIAL SEQUENCE
  Synthetic Construct
KEGYK

SEQ ID NO: 3715 - protein, 5 aa, ARTIFICIAL SEQUENCE
  Synthetic Construct
KEHAK

SEQ ID NO: 3716 - protein, 5 aa, ARTIFICIAL SEQUENCE
  Synthetic Construct
KEHDK

SEQ ID NO: 3717 - protein, 5 aa, ARTIFICIAL SEQUENCE
  Synthetic Construct
KEHEK

SEQ ID NO: 3718 - protein, 5 aa, ARTIFICIAL SEQUENCE
  Synthetic Construct
KEHFK

SEQ ID NO: 3719 - protein, 5 aa, ARTIFICIAL SEQUENCE
  Synthetic Construct
KEHGK

SEQ ID NO: 3720 - protein, 5 aa, ARTIFICIAL SEQUENCE
  Synthetic Construct
KEHHK

SEQ ID NO: 3721 - protein, 5 aa, ARTIFICIAL SEQUENCE
  Synthetic Construct
KEHIK

SEQ ID NO: 3722 - protein, 5 aa, ARTIFICIAL SEQUENCE
  Synthetic Construct
KEHLK

SEQ ID NO: 3723 - protein, 5 aa, ARTIFICIAL SEQUENCE
  Synthetic Construct
KEHNK

SEQ ID NO: 3724 - protein, 5 aa, ARTIFICIAL SEQUENCE
  Synthetic Construct
KEHQK

SEQ ID NO: 3725 - protein, 5 aa, ARTIFICIAL SEQUENCE
  Synthetic Construct
KEHRK

SEQ ID NO: 3726 - protein, 5 aa, ARTIFICIAL SEQUENCE
  Synthetic Construct
KEHSK

SEQ ID NO: 3727 - protein, 5 aa, ARTIFICIAL SEQUENCE
  Synthetic Construct
KEHTK

SEQ ID NO: 3728 - protein, 5 aa, ARTIFICIAL SEQUENCE
  Synthetic Construct
KEHYK

SEQ ID NO: 3729 - protein, 5 aa, ARTIFICIAL SEQUENCE
  Synthetic Construct
KEIAK

SEQ ID NO: 3730 - protein, 5 aa, ARTIFICIAL SEQUENCE
  Synthetic Construct
KEIDK

SEQ ID NO: 3731 - protein, 5 aa, ARTIFICIAL SEQUENCE
  Synthetic Construct
KEIEK

SEQ ID NO: 3732 - protein, 5 aa, ARTIFICIAL SEQUENCE
  Synthetic Construct
KEIFK

SEQ ID NO: 3733 - protein, 5 aa, ARTIFICIAL SEQUENCE
  Synthetic Construct
KEIGK

SEQ ID NO: 3734 - protein, 5 aa, ARTIFICIAL SEQUENCE
  Synthetic Construct
KEIHK

SEQ ID NO: 3735 - protein, 5 aa, ARTIFICIAL SEQUENCE
  Synthetic Construct
KEIIK

SEQ ID NO: 3736 - protein, 5 aa, ARTIFICIAL SEQUENCE
  Synthetic Construct
KEILK

SEQ ID NO: 3737 - protein, 5 aa, ARTIFICIAL SEQUENCE
  Synthetic Construct
KEINK

SEQ ID NO: 3738 - protein, 5 aa, ARTIFICIAL SEQUENCE
  Synthetic Construct
KEIQK

SEQ ID NO: 3739 - protein, 5 aa, ARTIFICIAL SEQUENCE
  Synthetic Construct
KEIRK

SEQ ID NO: 3740 - protein, 5 aa, ARTIFICIAL SEQUENCE
  Synthetic Construct
KEISK

SEQ ID NO: 3741 - protein, 5 aa, ARTIFICIAL SEQUENCE
  Synthetic Construct
KEITK

SEQ ID NO: 3742 - protein, 5 aa, ARTIFICIAL SEQUENCE
  Synthetic Construct
KEIYK

SEQ ID NO: 3743 - protein, 5 aa, ARTIFICIAL SEQUENCE
  Synthetic Construct
KELAK

SEQ ID NO: 3744 - protein, 5 aa, ARTIFICIAL SEQUENCE
  Synthetic Construct
KELDK

SEQ ID NO: 3745 - protein, 5 aa, ARTIFICIAL SEQUENCE
  Synthetic Construct
KELEK

SEQ ID NO: 3746 - protein, 5 aa, ARTIFICIAL SEQUENCE
  Synthetic Construct
KELFK

SEQ ID NO: 3747 - protein, 5 aa, ARTIFICIAL SEQUENCE
  Synthetic Construct
KELGK

SEQ ID NO: 3748 - protein, 5 aa, ARTIFICIAL SEQUENCE
  Synthetic Construct
KELHK

SEQ ID NO: 3749 - protein, 5 aa, ARTIFICIAL SEQUENCE
  Synthetic Construct
KELIK

SEQ ID NO: 3750 - protein, 5 aa, ARTIFICIAL SEQUENCE
  Synthetic Construct
KELLK

SEQ ID NO: 3751 - protein, 5 aa, ARTIFICIAL SEQUENCE
  Synthetic Construct
KELNK

SEQ ID NO: 3752 - protein, 5 aa, ARTIFICIAL SEQUENCE
  Synthetic Construct
KELQK

SEQ ID NO: 3753 - protein, 5 aa, ARTIFICIAL SEQUENCE
  Synthetic Construct
KELRK

SEQ ID NO: 3754 - protein, 5 aa, ARTIFICIAL SEQUENCE
  Synthetic Construct
KELSK

SEQ ID NO: 3755 - protein, 5 aa, ARTIFICIAL SEQUENCE
  Synthetic Construct
KELTK

SEQ ID NO: 3756 - protein, 5 aa, ARTIFICIAL SEQUENCE
  Synthetic Construct
KELYK

SEQ ID NO: 3757 - protein, 5 aa, ARTIFICIAL SEQUENCE
  Synthetic Construct
KENAK

SEQ ID NO: 3758 - protein, 5 aa, ARTIFICIAL SEQUENCE
  Synthetic Construct
KENDK

SEQ ID NO: 3759 - protein, 5 aa, ARTIFICIAL SEQUENCE
  Synthetic Construct
KENEK

SEQ ID NO: 3760 - protein, 5 aa, ARTIFICIAL SEQUENCE
  Synthetic Construct
KENFK

SEQ ID NO: 3761 - protein, 5 aa, ARTIFICIAL SEQUENCE
  Synthetic Construct
KENGK

SEQ ID NO: 3762 - protein, 5 aa, ARTIFICIAL SEQUENCE
  Synthetic Construct
KENHK

SEQ ID NO: 3763 - protein, 5 aa, ARTIFICIAL SEQUENCE
  Synthetic Construct
KENIK

SEQ ID NO: 3764 - protein, 5 aa, ARTIFICIAL SEQUENCE
  Synthetic Construct
KENLK

SEQ ID NO: 3765 - protein, 5 aa, ARTIFICIAL SEQUENCE
  Synthetic Construct
KENNK

SEQ ID NO: 3766 - protein, 5 aa, ARTIFICIAL SEQUENCE
  Synthetic Construct
KENQK

SEQ ID NO: 3767 - protein, 5 aa, ARTIFICIAL SEQUENCE
  Synthetic Construct
KENRK

SEQ ID NO: 3768 - protein, 5 aa, ARTIFICIAL SEQUENCE
  Synthetic Construct
KENSK

SEQ ID NO: 3769 - protein, 5 aa, ARTIFICIAL SEQUENCE
  Synthetic Construct
KENTK

SEQ ID NO: 3770 - protein, 5 aa, ARTIFICIAL SEQUENCE
  Synthetic Construct
KENYK

SEQ ID NO: 3771 - protein, 5 aa, ARTIFICIAL SEQUENCE
  Synthetic Construct
KEPAK

SEQ ID NO: 3772 - protein, 5 aa, ARTIFICIAL SEQUENCE
  Synthetic Construct
KEPDK

SEQ ID NO: 3773 - protein, 5 aa, ARTIFICIAL SEQUENCE
  Synthetic Construct
KEPEK

SEQ ID NO: 3774 - protein, 5 aa, ARTIFICIAL SEQUENCE
  Synthetic Construct
KEPFK

SEQ ID NO: 3775 - protein, 5 aa, ARTIFICIAL SEQUENCE
  Synthetic Construct
KEPGK

SEQ ID NO: 3776 - protein, 5 aa, ARTIFICIAL SEQUENCE
  Synthetic Construct
KEPHK

SEQ ID NO: 3777 - protein, 5 aa, ARTIFICIAL SEQUENCE
  Synthetic Construct
KEPIK

SEQ ID NO: 3778 - protein, 5 aa, ARTIFICIAL SEQUENCE
  Synthetic Construct
KEPLK

SEQ ID NO: 3779 - protein, 5 aa, ARTIFICIAL SEQUENCE
  Synthetic Construct
KEPNK

SEQ ID NO: 3780 - protein, 5 aa, ARTIFICIAL SEQUENCE
  Synthetic Construct
KEPQK

SEQ ID NO: 3781 - protein, 5 aa, ARTIFICIAL SEQUENCE
  Synthetic Construct
KEPRK

SEQ ID NO: 3782 - protein, 5 aa, ARTIFICIAL SEQUENCE
  Synthetic Construct
KEPSK

SEQ ID NO: 3783 - protein, 5 aa, ARTIFICIAL SEQUENCE
  Synthetic Construct
KEPTK

SEQ ID NO: 3784 - protein, 5 aa, ARTIFICIAL SEQUENCE
  Synthetic Construct
KEPYK

SEQ ID NO: 3785 - protein, 5 aa, ARTIFICIAL SEQUENCE
  Synthetic Construct
KEQAK

SEQ ID NO: 3786 - protein, 5 aa, ARTIFICIAL SEQUENCE
  Synthetic Construct
KEQDK

SEQ ID NO: 3787 - protein, 5 aa, ARTIFICIAL SEQUENCE
  Synthetic Construct
KEQEK

SEQ ID NO: 3788 - protein, 5 aa, ARTIFICIAL SEQUENCE
  Synthetic Construct
KEQFK

SEQ ID NO: 3789 - protein, 5 aa, ARTIFICIAL SEQUENCE
  Synthetic Construct
KEQGK

SEQ ID NO: 3790 - protein, 5 aa, ARTIFICIAL SEQUENCE
  Synthetic Construct
KEQHK

SEQ ID NO: 3791 - protein, 5 aa, ARTIFICIAL SEQUENCE
  Synthetic Construct
KEQIK

SEQ ID NO: 3792 - protein, 5 aa, ARTIFICIAL SEQUENCE
  Synthetic Construct
KEQLK

SEQ ID NO: 3793 - protein, 5 aa, ARTIFICIAL SEQUENCE
  Synthetic Construct
KEQNK

SEQ ID NO: 3794 - protein, 5 aa, ARTIFICIAL SEQUENCE
  Synthetic Construct
KEQQK

SEQ ID NO: 3795 - protein, 5 aa, ARTIFICIAL SEQUENCE
  Synthetic Construct
KEQRK

SEQ ID NO: 3796 - protein, 5 aa, ARTIFICIAL SEQUENCE
  Synthetic Construct
KEQSK

SEQ ID NO: 3797 - protein, 5 aa, ARTIFICIAL SEQUENCE
  Synthetic Construct
KEQTK

SEQ ID NO: 3798 - protein, 5 aa, ARTIFICIAL SEQUENCE
  Synthetic Construct
KEQYK

SEQ ID NO: 3799 - protein, 5 aa, ARTIFICIAL SEQUENCE
  Synthetic Construct
KERAK

SEQ ID NO: 3800 - protein, 5 aa, ARTIFICIAL SEQUENCE
  Synthetic Construct
KERDK

SEQ ID NO: 3801 - protein, 5 aa, ARTIFICIAL SEQUENCE
  Synthetic Construct
KEREK

SEQ ID NO: 3802 - protein, 5 aa, ARTIFICIAL SEQUENCE
  Synthetic Construct
KERFK

SEQ ID NO: 3803 - protein, 5 aa, ARTIFICIAL SEQUENCE
  Synthetic Construct
KERGK

SEQ ID NO: 3804 - protein, 5 aa, ARTIFICIAL SEQUENCE
  Synthetic Construct
KERHK

SEQ ID NO: 3805 - protein, 5 aa, ARTIFICIAL SEQUENCE
  Synthetic Construct
KERIK

SEQ ID NO: 3806 - protein, 5 aa, ARTIFICIAL SEQUENCE
  Synthetic Construct
KERLK

SEQ ID NO: 3807 - protein, 5 aa, ARTIFICIAL SEQUENCE
  Synthetic Construct
KERNK

SEQ ID NO: 3808 - protein, 5 aa, ARTIFICIAL SEQUENCE
  Synthetic Construct
KERQK

SEQ ID NO: 3809 - protein, 5 aa, ARTIFICIAL SEQUENCE
  Synthetic Construct
KERRK

SEQ ID NO: 3810 - protein, 5 aa, ARTIFICIAL SEQUENCE
  Synthetic Construct
KERSK

SEQ ID NO: 3811 - protein, 5 aa, ARTIFICIAL SEQUENCE
  Synthetic Construct
KERTK

SEQ ID NO: 3812 - protein, 5 aa, ARTIFICIAL SEQUENCE
  Synthetic Construct
KERYK

SEQ ID NO: 3813 - protein, 5 aa, ARTIFICIAL SEQUENCE
  Synthetic Construct
KESAK

SEQ ID NO: 3814 - protein, 5 aa, ARTIFICIAL SEQUENCE
  Synthetic Construct
KESDK

SEQ ID NO: 3815 - protein, 5 aa, ARTIFICIAL SEQUENCE
  Synthetic Construct
KESEK

SEQ ID NO: 3816 - protein, 5 aa, ARTIFICIAL SEQUENCE
  Synthetic Construct
KESFK

SEQ ID NO: 3817 - protein, 5 aa, ARTIFICIAL SEQUENCE
  Synthetic Construct
KESGK

SEQ ID NO: 3818 - protein, 5 aa, ARTIFICIAL SEQUENCE
  Synthetic Construct
KESHK

SEQ ID NO: 3819 - protein, 5 aa, ARTIFICIAL SEQUENCE
  Synthetic Construct
KESIK

SEQ ID NO: 3820 - protein, 5 aa, ARTIFICIAL SEQUENCE
  Synthetic Construct
KESLK

SEQ ID NO: 3821 - protein, 5 aa, ARTIFICIAL SEQUENCE
  Synthetic Construct
KESNK

SEQ ID NO: 3822 - protein, 5 aa, ARTIFICIAL SEQUENCE
  Synthetic Construct
KESQK

SEQ ID NO: 3823 - protein, 5 aa, ARTIFICIAL SEQUENCE
  Synthetic Construct
KESRK

SEQ ID NO: 3824 - protein, 5 aa, ARTIFICIAL SEQUENCE
  Synthetic Construct
KESSK

SEQ ID NO: 3825 - protein, 5 aa, ARTIFICIAL SEQUENCE
  Synthetic Construct
KESTK

SEQ ID NO: 3826 - protein, 5 aa, ARTIFICIAL SEQUENCE
  Synthetic Construct
KESYK

SEQ ID NO: 3827 - protein, 5 aa, ARTIFICIAL SEQUENCE
  Synthetic Construct
KETAK

SEQ ID NO: 3828 - protein, 5 aa, ARTIFICIAL SEQUENCE
  Synthetic Construct
KETDK

SEQ ID NO: 3829 - protein, 5 aa, ARTIFICIAL SEQUENCE
  Synthetic Construct
KETEK

SEQ ID NO: 3830 - protein, 5 aa, ARTIFICIAL SEQUENCE
  Synthetic Construct
KETFK

SEQ ID NO: 3831 - protein, 5 aa, ARTIFICIAL SEQUENCE
  Synthetic Construct
KETGK

SEQ ID NO: 3832 - protein, 5 aa, ARTIFICIAL SEQUENCE
  Synthetic Construct
KETHK

SEQ ID NO: 3833 - protein, 5 aa, ARTIFICIAL SEQUENCE
  Synthetic Construct
KETIK

SEQ ID NO: 3834 - protein, 5 aa, ARTIFICIAL SEQUENCE
  Synthetic Construct
KETLK

SEQ ID NO: 3835 - protein, 5 aa, ARTIFICIAL SEQUENCE
  Synthetic Construct
KETNK

SEQ ID NO: 3836 - protein, 5 aa, ARTIFICIAL SEQUENCE
  Synthetic Construct
KETQK

SEQ ID NO: 3837 - protein, 5 aa, ARTIFICIAL SEQUENCE
  Synthetic Construct
KETRK

SEQ ID NO: 3838 - protein, 5 aa, ARTIFICIAL SEQUENCE
  Synthetic Construct
KETSK

SEQ ID NO: 3839 - protein, 5 aa, ARTIFICIAL SEQUENCE
  Synthetic Construct
KETTK

SEQ ID NO: 3840 - protein, 5 aa, ARTIFICIAL SEQUENCE
  Synthetic Construct
KETYK

SEQ ID NO: 3841 - protein, 5 aa, ARTIFICIAL SEQUENCE
  Synthetic Construct
KEYAK

SEQ ID NO: 3842 - protein, 5 aa, ARTIFICIAL SEQUENCE
  Synthetic Construct
KEYDK

SEQ ID NO: 3843 - protein, 5 aa, ARTIFICIAL SEQUENCE
  Synthetic Construct
KEYEK

SEQ ID NO: 3844 - protein, 5 aa, ARTIFICIAL SEQUENCE
  Synthetic Construct
KEYFK

SEQ ID NO: 3845 - protein, 5 aa, ARTIFICIAL SEQUENCE
  Synthetic Construct
KEYGK

SEQ ID NO: 3846 - protein, 5 aa, ARTIFICIAL SEQUENCE
  Synthetic Construct
KEYHK

SEQ ID NO: 3847 - protein, 5 aa, ARTIFICIAL SEQUENCE
  Synthetic Construct
KEYIK

SEQ ID NO: 3848 - protein, 5 aa, ARTIFICIAL SEQUENCE
  Synthetic Construct
KEYLK

SEQ ID NO: 3849 - protein, 5 aa, ARTIFICIAL SEQUENCE
  Synthetic Construct
KEYNK

SEQ ID NO: 3850 - protein, 5 aa, ARTIFICIAL SEQUENCE
  Synthetic Construct
KEYQK

SEQ ID NO: 3851 - protein, 5 aa, ARTIFICIAL SEQUENCE
  Synthetic Construct
KEYRK

SEQ ID NO: 3852 - protein, 5 aa, ARTIFICIAL SEQUENCE
  Synthetic Construct
KEYSK

SEQ ID NO: 3853 - protein, 5 aa, ARTIFICIAL SEQUENCE
  Synthetic Construct
KEYTK

SEQ ID NO: 3854 - protein, 5 aa, ARTIFICIAL SEQUENCE
  Synthetic Construct
KEYYK

SEQ ID NO: 3855 - protein, 5 aa, ARTIFICIAL SEQUENCE
  Synthetic Construct
KFAAK

SEQ ID NO: 3856 - protein, 5 aa, ARTIFICIAL SEQUENCE
  Synthetic Construct
KFADK

SEQ ID NO: 3857 - protein, 5 aa, ARTIFICIAL SEQUENCE
  Synthetic Construct
KFAEK

SEQ ID NO: 3858 - protein, 5 aa, ARTIFICIAL SEQUENCE
  Synthetic Construct
KFAFK

SEQ ID NO: 3859 - protein, 5 aa, ARTIFICIAL SEQUENCE
  Synthetic Construct
KFAGK

SEQ ID NO: 3860 - protein, 5 aa, ARTIFICIAL SEQUENCE
  Synthetic Construct
KFAHK

SEQ ID NO: 3861 - protein, 5 aa, ARTIFICIAL SEQUENCE
  Synthetic Construct
KFAIK

SEQ ID NO: 3862 - protein, 5 aa, ARTIFICIAL SEQUENCE
  Synthetic Construct
KFALK

SEQ ID NO: 3863 - protein, 5 aa, ARTIFICIAL SEQUENCE
  Synthetic Construct
KFANK

SEQ ID NO: 3864 - protein, 5 aa, ARTIFICIAL SEQUENCE
  Synthetic Construct
KFAQK

SEQ ID NO: 3865 - protein, 5 aa, ARTIFICIAL SEQUENCE
  Synthetic Construct
KFARK

SEQ ID NO: 3866 - protein, 5 aa, ARTIFICIAL SEQUENCE
  Synthetic Construct
KFASK

SEQ ID NO: 3867 - protein, 5 aa, ARTIFICIAL SEQUENCE
  Synthetic Construct
KFATK

SEQ ID NO: 3868 - protein, 5 aa, ARTIFICIAL SEQUENCE
  Synthetic Construct
KFAYK

SEQ ID NO: 3869 - protein, 5 aa, ARTIFICIAL SEQUENCE
  Synthetic Construct
KFDAK

SEQ ID NO: 3870 - protein, 5 aa, ARTIFICIAL SEQUENCE
  Synthetic Construct
KFDDK

SEQ ID NO: 3871 - protein, 5 aa, ARTIFICIAL SEQUENCE
  Synthetic Construct
KFDEK

SEQ ID NO: 3872 - protein, 5 aa, ARTIFICIAL SEQUENCE
  Synthetic Construct
KFDFK

SEQ ID NO: 3873 - protein, 5 aa, ARTIFICIAL SEQUENCE
  Synthetic Construct
KFDGK

SEQ ID NO: 3874 - protein, 5 aa, ARTIFICIAL SEQUENCE
  Synthetic Construct
KFDHK

SEQ ID NO: 3875 - protein, 5 aa, ARTIFICIAL SEQUENCE
  Synthetic Construct
KFDIK

SEQ ID NO: 3876 - protein, 5 aa, ARTIFICIAL SEQUENCE
  Synthetic Construct
KFDLK

SEQ ID NO: 3877 - protein, 5 aa, ARTIFICIAL SEQUENCE
  Synthetic Construct
KFDNK

SEQ ID NO: 3878 - protein, 5 aa, ARTIFICIAL SEQUENCE
  Synthetic Construct
KFDQK

SEQ ID NO: 3879 - protein, 5 aa, ARTIFICIAL SEQUENCE
  Synthetic Construct
KFDRK

SEQ ID NO: 3880 - protein, 5 aa, ARTIFICIAL SEQUENCE
  Synthetic Construct
KFDSK

SEQ ID NO: 3881 - protein, 5 aa, ARTIFICIAL SEQUENCE
  Synthetic Construct
KFDTK

SEQ ID NO: 3882 - protein, 5 aa, ARTIFICIAL SEQUENCE
  Synthetic Construct
KFDYK

SEQ ID NO: 3883 - protein, 5 aa, ARTIFICIAL SEQUENCE
  Synthetic Construct
KFEAK

SEQ ID NO: 3884 - protein, 5 aa, ARTIFICIAL SEQUENCE
  Synthetic Construct
KFEDK

SEQ ID NO: 3885 - protein, 5 aa, ARTIFICIAL SEQUENCE
  Synthetic Construct
KFEEK

SEQ ID NO: 3886 - protein, 5 aa, ARTIFICIAL SEQUENCE
  Synthetic Construct
KFEFK

SEQ ID NO: 3887 - protein, 5 aa, ARTIFICIAL SEQUENCE
  Synthetic Construct
KFEGK

SEQ ID NO: 3888 - protein, 5 aa, ARTIFICIAL SEQUENCE
  Synthetic Construct
KFEHK

SEQ ID NO: 3889 - protein, 5 aa, ARTIFICIAL SEQUENCE
  Synthetic Construct
KFEIK

SEQ ID NO: 3890 - protein, 5 aa, ARTIFICIAL SEQUENCE
  Synthetic Construct
KFELK

SEQ ID NO: 3891 - protein, 5 aa, ARTIFICIAL SEQUENCE
  Synthetic Construct
KFENK

SEQ ID NO: 3892 - protein, 5 aa, ARTIFICIAL SEQUENCE
  Synthetic Construct
KFEQK

SEQ ID NO: 3893 - protein, 5 aa, ARTIFICIAL SEQUENCE
  Synthetic Construct
KFERK

SEQ ID NO: 3894 - protein, 5 aa, ARTIFICIAL SEQUENCE
  Synthetic Construct
KFESK

SEQ ID NO: 3895 - protein, 5 aa, ARTIFICIAL SEQUENCE
  Synthetic Construct
KFETK

SEQ ID NO: 3896 - protein, 5 aa, ARTIFICIAL SEQUENCE
  Synthetic Construct
KFEYK

SEQ ID NO: 3897 - protein, 5 aa, ARTIFICIAL SEQUENCE
  Synthetic Construct
KFFAK

SEQ ID NO: 3898 - protein, 5 aa, ARTIFICIAL SEQUENCE
  Synthetic Construct
KFFDK

SEQ ID NO: 3899 - protein, 5 aa, ARTIFICIAL SEQUENCE
  Synthetic Construct
KFFEK

SEQ ID NO: 3900 - protein, 5 aa, ARTIFICIAL SEQUENCE
  Synthetic Construct
KFFFK

SEQ ID NO: 3901 - protein, 5 aa, ARTIFICIAL SEQUENCE
  Synthetic Construct
KFFGK

SEQ ID NO: 3902 - protein, 5 aa, ARTIFICIAL SEQUENCE
  Synthetic Construct
KFFHK

SEQ ID NO: 3903 - protein, 5 aa, ARTIFICIAL SEQUENCE
  Synthetic Construct
KFFIK

SEQ ID NO: 3904 - protein, 5 aa, ARTIFICIAL SEQUENCE
  Synthetic Construct
KFFLK

SEQ ID NO: 3905 - protein, 5 aa, ARTIFICIAL SEQUENCE
  Synthetic Construct
KFFNK

SEQ ID NO: 3906 - protein, 5 aa, ARTIFICIAL SEQUENCE
  Synthetic Construct
KFFQK

SEQ ID NO: 3907 - protein, 5 aa, ARTIFICIAL SEQUENCE
  Synthetic Construct
KFFRK

SEQ ID NO: 3908 - protein, 5 aa, ARTIFICIAL SEQUENCE
  Synthetic Construct
KFFSK

SEQ ID NO: 3909 - protein, 5 aa, ARTIFICIAL SEQUENCE
  Synthetic Construct
KFFTK

SEQ ID NO: 3910 - protein, 5 aa, ARTIFICIAL SEQUENCE
  Synthetic Construct
KFFYK

SEQ ID NO: 3911 - protein, 5 aa, ARTIFICIAL SEQUENCE
  Synthetic Construct
KFGAK

SEQ ID NO: 3912 - protein, 5 aa, ARTIFICIAL SEQUENCE
  Synthetic Construct
KFGDK

SEQ ID NO: 3913 - protein, 5 aa, ARTIFICIAL SEQUENCE
  Synthetic Construct
KFGEK

SEQ ID NO: 3914 - protein, 5 aa, ARTIFICIAL SEQUENCE
  Synthetic Construct
KFGFK

SEQ ID NO: 3915 - protein, 5 aa, ARTIFICIAL SEQUENCE
  Synthetic Construct
KFGGK

SEQ ID NO: 3916 - protein, 5 aa, ARTIFICIAL SEQUENCE
  Synthetic Construct
KFGHK

SEQ ID NO: 3917 - protein, 5 aa, ARTIFICIAL SEQUENCE
  Synthetic Construct
KFGIK

SEQ ID NO: 3918 - protein, 5 aa, ARTIFICIAL SEQUENCE
  Synthetic Construct
KFGLK

SEQ ID NO: 3919 - protein, 5 aa, ARTIFICIAL SEQUENCE
  Synthetic Construct
KFGNK

SEQ ID NO: 3920 - protein, 5 aa, ARTIFICIAL SEQUENCE
  Synthetic Construct
KFGQK

SEQ ID NO: 3921 - protein, 5 aa, ARTIFICIAL SEQUENCE
  Synthetic Construct
KFGRK

SEQ ID NO: 3922 - protein, 5 aa, ARTIFICIAL SEQUENCE
  Synthetic Construct
KFGSK

SEQ ID NO: 3923 - protein, 5 aa, ARTIFICIAL SEQUENCE
  Synthetic Construct
KFGTK

SEQ ID NO: 3924 - protein, 5 aa, ARTIFICIAL SEQUENCE
  Synthetic Construct
KFGYK

SEQ ID NO: 3925 - protein, 5 aa, ARTIFICIAL SEQUENCE
  Synthetic Construct
KFHAK

SEQ ID NO: 3926 - protein, 5 aa, ARTIFICIAL SEQUENCE
  Synthetic Construct
KFHDK

SEQ ID NO: 3927 - protein, 5 aa, ARTIFICIAL SEQUENCE
  Synthetic Construct
KFHEK

SEQ ID NO: 3928 - protein, 5 aa, ARTIFICIAL SEQUENCE
  Synthetic Construct
KFHFK

SEQ ID NO: 3929 - protein, 5 aa, ARTIFICIAL SEQUENCE
  Synthetic Construct
KFHGK

SEQ ID NO: 3930 - protein, 5 aa, ARTIFICIAL SEQUENCE
  Synthetic Construct
KFHHK

SEQ ID NO: 3931 - protein, 5 aa, ARTIFICIAL SEQUENCE
  Synthetic Construct
KFHIK

SEQ ID NO: 3932 - protein, 5 aa, ARTIFICIAL SEQUENCE
  Synthetic Construct
KFHLK

SEQ ID NO: 3933 - protein, 5 aa, ARTIFICIAL SEQUENCE
  Synthetic Construct
KFHNK

SEQ ID NO: 3934 - protein, 5 aa, ARTIFICIAL SEQUENCE
  Synthetic Construct
KFHQK

SEQ ID NO: 3935 - protein, 5 aa, ARTIFICIAL SEQUENCE
  Synthetic Construct
KFHRK

SEQ ID NO: 3936 - protein, 5 aa, ARTIFICIAL SEQUENCE
  Synthetic Construct
KFHSK

SEQ ID NO: 3937 - protein, 5 aa, ARTIFICIAL SEQUENCE
  Synthetic Construct
KFHTK

SEQ ID NO: 3938 - protein, 5 aa, ARTIFICIAL SEQUENCE
  Synthetic Construct
KFHYK

SEQ ID NO: 3939 - protein, 5 aa, ARTIFICIAL SEQUENCE
  Synthetic Construct
KFIAK

SEQ ID NO: 3940 - protein, 5 aa, ARTIFICIAL SEQUENCE
  Synthetic Construct
KFIDK

SEQ ID NO: 3941 - protein, 5 aa, ARTIFICIAL SEQUENCE
  Synthetic Construct
KFIEK

SEQ ID NO: 3942 - protein, 5 aa, ARTIFICIAL SEQUENCE
  Synthetic Construct
KFIFK

SEQ ID NO: 3943 - protein, 5 aa, ARTIFICIAL SEQUENCE
  Synthetic Construct
KFIGK

SEQ ID NO: 3944 - protein, 5 aa, ARTIFICIAL SEQUENCE
  Synthetic Construct
KFIHK

SEQ ID NO: 3945 - protein, 5 aa, ARTIFICIAL SEQUENCE
  Synthetic Construct
KFIIK

SEQ ID NO: 3946 - protein, 5 aa, ARTIFICIAL SEQUENCE
  Synthetic Construct
KFILK

SEQ ID NO: 3947 - protein, 5 aa, ARTIFICIAL SEQUENCE
  Synthetic Construct
KFINK

SEQ ID NO: 3948 - protein, 5 aa, ARTIFICIAL SEQUENCE
  Synthetic Construct
KFIQK

SEQ ID NO: 3949 - protein, 5 aa, ARTIFICIAL SEQUENCE
  Synthetic Construct
KFIRK

SEQ ID NO: 3950 - protein, 5 aa, ARTIFICIAL SEQUENCE
  Synthetic Construct
KFISK

SEQ ID NO: 3951 - protein, 5 aa, ARTIFICIAL SEQUENCE
  Synthetic Construct
KFITK

SEQ ID NO: 3952 - protein, 5 aa, ARTIFICIAL SEQUENCE
  Synthetic Construct
KFIYK

SEQ ID NO: 3953 - protein, 5 aa, ARTIFICIAL SEQUENCE
  Synthetic Construct
KFLAK

SEQ ID NO: 3954 - protein, 5 aa, ARTIFICIAL SEQUENCE
  Synthetic Construct
KFLDK

SEQ ID NO: 3955 - protein, 5 aa, ARTIFICIAL SEQUENCE
  Synthetic Construct
KFLEK

SEQ ID NO: 3956 - protein, 5 aa, ARTIFICIAL SEQUENCE
  Synthetic Construct
KFLFK

SEQ ID NO: 3957 - protein, 5 aa, ARTIFICIAL SEQUENCE
  Synthetic Construct
KFLGK

SEQ ID NO: 3958 - protein, 5 aa, ARTIFICIAL SEQUENCE
  Synthetic Construct
KFLHK

SEQ ID NO: 3959 - protein, 5 aa, ARTIFICIAL SEQUENCE
  Synthetic Construct
KFLIK

SEQ ID NO: 3960 - protein, 5 aa, ARTIFICIAL SEQUENCE
  Synthetic Construct
KFLLK

SEQ ID NO: 3961 - protein, 5 aa, ARTIFICIAL SEQUENCE
  Synthetic Construct
KFLNK

SEQ ID NO: 3962 - protein, 5 aa, ARTIFICIAL SEQUENCE
  Synthetic Construct
KFLQK

SEQ ID NO: 3963 - protein, 5 aa, ARTIFICIAL SEQUENCE
  Synthetic Construct
KFLRK

SEQ ID NO: 3964 - protein, 5 aa, ARTIFICIAL SEQUENCE
  Synthetic Construct
KFLSK

SEQ ID NO: 3965 - protein, 5 aa, ARTIFICIAL SEQUENCE
  Synthetic Construct
KFLTK

SEQ ID NO: 3966 - protein, 5 aa, ARTIFICIAL SEQUENCE
  Synthetic Construct
KFLYK

SEQ ID NO: 3967 - protein, 5 aa, ARTIFICIAL SEQUENCE
  Synthetic Construct
KFNAK

SEQ ID NO: 3968 - protein, 5 aa, ARTIFICIAL SEQUENCE
  Synthetic Construct
KFNDK

SEQ ID NO: 3969 - protein, 5 aa, ARTIFICIAL SEQUENCE
  Synthetic Construct
KFNEK

SEQ ID NO: 3970 - protein, 5 aa, ARTIFICIAL SEQUENCE
  Synthetic Construct
KFNFK

SEQ ID NO: 3971 - protein, 5 aa, ARTIFICIAL SEQUENCE
  Synthetic Construct
KFNGK

SEQ ID NO: 3972 - protein, 5 aa, ARTIFICIAL SEQUENCE
  Synthetic Construct
KFNHK

SEQ ID NO: 3973 - protein, 5 aa, ARTIFICIAL SEQUENCE
  Synthetic Construct
KFNIK

SEQ ID NO: 3974 - protein, 5 aa, ARTIFICIAL SEQUENCE
  Synthetic Construct
KFNLK

SEQ ID NO: 3975 - protein, 5 aa, ARTIFICIAL SEQUENCE
  Synthetic Construct
KFNNK

SEQ ID NO: 3976 - protein, 5 aa, ARTIFICIAL SEQUENCE
  Synthetic Construct
KFNQK

SEQ ID NO: 3977 - protein, 5 aa, ARTIFICIAL SEQUENCE
  Synthetic Construct
KFNRK

SEQ ID NO: 3978 - protein, 5 aa, ARTIFICIAL SEQUENCE
  Synthetic Construct
KFNSK

SEQ ID NO: 3979 - protein, 5 aa, ARTIFICIAL SEQUENCE
  Synthetic Construct
KFNTK

SEQ ID NO: 3980 - protein, 5 aa, ARTIFICIAL SEQUENCE
  Synthetic Construct
KFNYK

SEQ ID NO: 3981 - protein, 5 aa, ARTIFICIAL SEQUENCE
  Synthetic Construct
KFPAK

SEQ ID NO: 3982 - protein, 5 aa, ARTIFICIAL SEQUENCE
  Synthetic Construct
KFPDK

SEQ ID NO: 3983 - protein, 5 aa, ARTIFICIAL SEQUENCE
  Synthetic Construct
KFPEK

SEQ ID NO: 3984 - protein, 5 aa, ARTIFICIAL SEQUENCE
  Synthetic Construct
KFPFK

SEQ ID NO: 3985 - protein, 5 aa, ARTIFICIAL SEQUENCE
  Synthetic Construct
KFPGK

SEQ ID NO: 3986 - protein, 5 aa, ARTIFICIAL SEQUENCE
  Synthetic Construct
KFPHK

SEQ ID NO: 3987 - protein, 5 aa, ARTIFICIAL SEQUENCE
  Synthetic Construct
KFPIK

SEQ ID NO: 3988 - protein, 5 aa, ARTIFICIAL SEQUENCE
  Synthetic Construct
KFPLK

SEQ ID NO: 3989 - protein, 5 aa, ARTIFICIAL SEQUENCE
  Synthetic Construct
KFPNK

SEQ ID NO: 3990 - protein, 5 aa, ARTIFICIAL SEQUENCE
  Synthetic Construct
KFPQK

SEQ ID NO: 3991 - protein, 5 aa, ARTIFICIAL SEQUENCE
  Synthetic Construct
KFPRK

SEQ ID NO: 3992 - protein, 5 aa, ARTIFICIAL SEQUENCE
  Synthetic Construct
KFPSK

SEQ ID NO: 3993 - protein, 5 aa, ARTIFICIAL SEQUENCE
  Synthetic Construct
KFPTK

SEQ ID NO: 3994 - protein, 5 aa, ARTIFICIAL SEQUENCE
  Synthetic Construct
KFPYK

SEQ ID NO: 3995 - protein, 5 aa, ARTIFICIAL SEQUENCE
  Synthetic Construct
KFQAK

SEQ ID NO: 3996 - protein, 5 aa, ARTIFICIAL SEQUENCE
  Synthetic Construct
KFQDK

SEQ ID NO: 3997 - protein, 5 aa, ARTIFICIAL SEQUENCE
  Synthetic Construct
KFQEK

SEQ ID NO: 3998 - protein, 5 aa, ARTIFICIAL SEQUENCE
  Synthetic Construct
KFQFK

SEQ ID NO: 3999 - protein, 5 aa, ARTIFICIAL SEQUENCE
  Synthetic Construct
KFQGK

SEQ ID NO: 4000 - protein, 5 aa, ARTIFICIAL SEQUENCE
  Synthetic Construct
KFQHK

SEQ ID NO: 4001 - protein, 5 aa, ARTIFICIAL SEQUENCE
  Synthetic Construct
KFQIK

SEQ ID NO: 4002 - protein, 5 aa, ARTIFICIAL SEQUENCE
  Synthetic Construct
KFQLK

SEQ ID NO: 4003 - protein, 5 aa, ARTIFICIAL SEQUENCE
  Synthetic Construct
KFQNK

SEQ ID NO: 4004 - protein, 5 aa, ARTIFICIAL SEQUENCE
  Synthetic Construct
KFQQK

SEQ ID NO: 4005 - protein, 5 aa, ARTIFICIAL SEQUENCE
  Synthetic Construct
KFQRK

SEQ ID NO: 4006 - protein, 5 aa, ARTIFICIAL SEQUENCE
  Synthetic Construct
KFQSK

SEQ ID NO: 4007 - protein, 5 aa, ARTIFICIAL SEQUENCE
  Synthetic Construct
KFQTK

SEQ ID NO: 4008 - protein, 5 aa, ARTIFICIAL SEQUENCE
  Synthetic Construct
KFQYK

SEQ ID NO: 4009 - protein, 5 aa, ARTIFICIAL SEQUENCE
  Synthetic Construct
KFRAK

SEQ ID NO: 4010 - protein, 5 aa, ARTIFICIAL SEQUENCE
  Synthetic Construct
KFRDK

SEQ ID NO: 4011 - protein, 5 aa, ARTIFICIAL SEQUENCE
  Synthetic Construct
KFREK

SEQ ID NO: 4012 - protein, 5 aa, ARTIFICIAL SEQUENCE
  Synthetic Construct
KFRFK

SEQ ID NO: 4013 - protein, 5 aa, ARTIFICIAL SEQUENCE
  Synthetic Construct
KFRGK

SEQ ID NO: 4014 - protein, 5 aa, ARTIFICIAL SEQUENCE
  Synthetic Construct
KFRHK

SEQ ID NO: 4015 - protein, 5 aa, ARTIFICIAL SEQUENCE
  Synthetic Construct
KFRIK

SEQ ID NO: 4016 - protein, 5 aa, ARTIFICIAL SEQUENCE
  Synthetic Construct
KFRLK

SEQ ID NO: 4017 - protein, 5 aa, ARTIFICIAL SEQUENCE
  Synthetic Construct
KFRNK

SEQ ID NO: 4018 - protein, 5 aa, ARTIFICIAL SEQUENCE
  Synthetic Construct
KFRQK

SEQ ID NO: 4019 - protein, 5 aa, ARTIFICIAL SEQUENCE
  Synthetic Construct
KFRRK

SEQ ID NO: 4020 - protein, 5 aa, ARTIFICIAL SEQUENCE
  Synthetic Construct
KFRSK

SEQ ID NO: 4021 - protein, 5 aa, ARTIFICIAL SEQUENCE
  Synthetic Construct
KFRTK

SEQ ID NO: 4022 - protein, 5 aa, ARTIFICIAL SEQUENCE
  Synthetic Construct
KFRYK

SEQ ID NO: 4023 - protein, 5 aa, ARTIFICIAL SEQUENCE
  Synthetic Construct
KFSAK

SEQ ID NO: 4024 - protein, 5 aa, ARTIFICIAL SEQUENCE
  Synthetic Construct
KFSDK

SEQ ID NO: 4025 - protein, 5 aa, ARTIFICIAL SEQUENCE
  Synthetic Construct
KFSEK

SEQ ID NO: 4026 - protein, 5 aa, ARTIFICIAL SEQUENCE
  Synthetic Construct
KFSFK

SEQ ID NO: 4027 - protein, 5 aa, ARTIFICIAL SEQUENCE
  Synthetic Construct
KFSGK

SEQ ID NO: 4028 - protein, 5 aa, ARTIFICIAL SEQUENCE
  Synthetic Construct
KFSHK

SEQ ID NO: 4029 - protein, 5 aa, ARTIFICIAL SEQUENCE
  Synthetic Construct
KFSIK

SEQ ID NO: 4030 - protein, 5 aa, ARTIFICIAL SEQUENCE
  Synthetic Construct
KFSLK

SEQ ID NO: 4031 - protein, 5 aa, ARTIFICIAL SEQUENCE
  Synthetic Construct
KFSNK

SEQ ID NO: 4032 - protein, 5 aa, ARTIFICIAL SEQUENCE
  Synthetic Construct
KFSQK

SEQ ID NO: 4033 - protein, 5 aa, ARTIFICIAL SEQUENCE
  Synthetic Construct
KFSRK

SEQ ID NO: 4034 - protein, 5 aa, ARTIFICIAL SEQUENCE
  Synthetic Construct
KFSSK

SEQ ID NO: 4035 - protein, 5 aa, ARTIFICIAL SEQUENCE
  Synthetic Construct
KFSTK

SEQ ID NO: 4036 - protein, 5 aa, ARTIFICIAL SEQUENCE
  Synthetic Construct
KFSYK

SEQ ID NO: 4037 - protein, 5 aa, ARTIFICIAL SEQUENCE
  Synthetic Construct
KFTAK

SEQ ID NO: 4038 - protein, 5 aa, ARTIFICIAL SEQUENCE
  Synthetic Construct
KFTDK

SEQ ID NO: 4039 - protein, 5 aa, ARTIFICIAL SEQUENCE
  Synthetic Construct
KFTEK

SEQ ID NO: 4040 - protein, 5 aa, ARTIFICIAL SEQUENCE
  Synthetic Construct
KFTFK

SEQ ID NO: 4041 - protein, 5 aa, ARTIFICIAL SEQUENCE
  Synthetic Construct
KFTGK

SEQ ID NO: 4042 - protein, 5 aa, ARTIFICIAL SEQUENCE
  Synthetic Construct
KFTHK

SEQ ID NO: 4043 - protein, 5 aa, ARTIFICIAL SEQUENCE
  Synthetic Construct
KFTIK

SEQ ID NO: 4044 - protein, 5 aa, ARTIFICIAL SEQUENCE
  Synthetic Construct
KFTLK

SEQ ID NO: 4045 - protein, 5 aa, ARTIFICIAL SEQUENCE
  Synthetic Construct
KFTNK

SEQ ID NO: 4046 - protein, 5 aa, ARTIFICIAL SEQUENCE
  Synthetic Construct
KFTQK

SEQ ID NO: 4047 - protein, 5 aa, ARTIFICIAL SEQUENCE
  Synthetic Construct
KFTRK

SEQ ID NO: 4048 - protein, 5 aa, ARTIFICIAL SEQUENCE
  Synthetic Construct
KFTSK

SEQ ID NO: 4049 - protein, 5 aa, ARTIFICIAL SEQUENCE
  Synthetic Construct
KFTTK

SEQ ID NO: 4050 - protein, 5 aa, ARTIFICIAL SEQUENCE
  Synthetic Construct
KFTYK

SEQ ID NO: 4051 - protein, 5 aa, ARTIFICIAL SEQUENCE
  Synthetic Construct
KFYAK

SEQ ID NO: 4052 - protein, 5 aa, ARTIFICIAL SEQUENCE
  Synthetic Construct
KFYDK

SEQ ID NO: 4053 - protein, 5 aa, ARTIFICIAL SEQUENCE
  Synthetic Construct
KFYEK

SEQ ID NO: 4054 - protein, 5 aa, ARTIFICIAL SEQUENCE
  Synthetic Construct
KFYFK

SEQ ID NO: 4055 - protein, 5 aa, ARTIFICIAL SEQUENCE
  Synthetic Construct
KFYGK

SEQ ID NO: 4056 - protein, 5 aa, ARTIFICIAL SEQUENCE
  Synthetic Construct
KFYHK

SEQ ID NO: 4057 - protein, 5 aa, ARTIFICIAL SEQUENCE
  Synthetic Construct
KFYIK

SEQ ID NO: 4058 - protein, 5 aa, ARTIFICIAL SEQUENCE
  Synthetic Construct
KFYLK

SEQ ID NO: 4059 - protein, 5 aa, ARTIFICIAL SEQUENCE
  Synthetic Construct
KFYNK

SEQ ID NO: 4060 - protein, 5 aa, ARTIFICIAL SEQUENCE
  Synthetic Construct
KFYQK

SEQ ID NO: 4061 - protein, 5 aa, ARTIFICIAL SEQUENCE
  Synthetic Construct
KFYRK

SEQ ID NO: 4062 - protein, 5 aa, ARTIFICIAL SEQUENCE
  Synthetic Construct
KFYSK

SEQ ID NO: 4063 - protein, 5 aa, ARTIFICIAL SEQUENCE
  Synthetic Construct
KFYTK

SEQ ID NO: 4064 - protein, 5 aa, ARTIFICIAL SEQUENCE
  Synthetic Construct
KFYYK

SEQ ID NO: 4065 - protein, 5 aa, ARTIFICIAL SEQUENCE
  Synthetic Construct
KGAAK

SEQ ID NO: 4066 - protein, 5 aa, ARTIFICIAL SEQUENCE
  Synthetic Construct
KGADK

SEQ ID NO: 4067 - protein, 5 aa, ARTIFICIAL SEQUENCE
  Synthetic Construct
KGAEK

SEQ ID NO: 4068 - protein, 5 aa, ARTIFICIAL SEQUENCE
  Synthetic Construct
KGAFK

SEQ ID NO: 4069 - protein, 5 aa, ARTIFICIAL SEQUENCE
  Synthetic Construct
KGAGK

SEQ ID NO: 4070 - protein, 5 aa, ARTIFICIAL SEQUENCE
  Synthetic Construct
KGAHK

SEQ ID NO: 4071 - protein, 5 aa, ARTIFICIAL SEQUENCE
  Synthetic Construct
KGAIK

SEQ ID NO: 4072 - protein, 5 aa, ARTIFICIAL SEQUENCE
  Synthetic Construct
KGALK

SEQ ID NO: 4073 - protein, 5 aa, ARTIFICIAL SEQUENCE
  Synthetic Construct
KGANK

SEQ ID NO: 4074 - protein, 5 aa, ARTIFICIAL SEQUENCE
  Synthetic Construct
KGAQK

SEQ ID NO: 4075 - protein, 5 aa, ARTIFICIAL SEQUENCE
  Synthetic Construct
KGARK

SEQ ID NO: 4076 - protein, 5 aa, ARTIFICIAL SEQUENCE
  Synthetic Construct
KGASK

SEQ ID NO: 4077 - protein, 5 aa, ARTIFICIAL SEQUENCE
  Synthetic Construct
KGATK

SEQ ID NO: 4078 - protein, 5 aa, ARTIFICIAL SEQUENCE
  Synthetic Construct
KGAYK

SEQ ID NO: 4079 - protein, 5 aa, ARTIFICIAL SEQUENCE
  Synthetic Construct
KGDAK

SEQ ID NO: 4080 - protein, 5 aa, ARTIFICIAL SEQUENCE
  Synthetic Construct
KGDDK

SEQ ID NO: 4081 - protein, 5 aa, ARTIFICIAL SEQUENCE
  Synthetic Construct
KGDEK

SEQ ID NO: 4082 - protein, 5 aa, ARTIFICIAL SEQUENCE
  Synthetic Construct
KGDFK

SEQ ID NO: 4083 - protein, 5 aa, ARTIFICIAL SEQUENCE
  Synthetic Construct
KGDGK

SEQ ID NO: 4084 - protein, 5 aa, ARTIFICIAL SEQUENCE
  Synthetic Construct
KGDHK

SEQ ID NO: 4085 - protein, 5 aa, ARTIFICIAL SEQUENCE
  Synthetic Construct
KGDIK

SEQ ID NO: 4086 - protein, 5 aa, ARTIFICIAL SEQUENCE
  Synthetic Construct
KGDLK

SEQ ID NO: 4087 - protein, 5 aa, ARTIFICIAL SEQUENCE
  Synthetic Construct
KGDNK

SEQ ID NO: 4088 - protein, 5 aa, ARTIFICIAL SEQUENCE
  Synthetic Construct
KGDQK

SEQ ID NO: 4089 - protein, 5 aa, ARTIFICIAL SEQUENCE
  Synthetic Construct
KGDRK

SEQ ID NO: 4090 - protein, 5 aa, ARTIFICIAL SEQUENCE
  Synthetic Construct
KGDSK

SEQ ID NO: 4091 - protein, 5 aa, ARTIFICIAL SEQUENCE
  Synthetic Construct
KGDTK

SEQ ID NO: 4092 - protein, 5 aa, ARTIFICIAL SEQUENCE
  Synthetic Construct
KGDYK

SEQ ID NO: 4093 - protein, 5 aa, ARTIFICIAL SEQUENCE
  Synthetic Construct
KGEAK

SEQ ID NO: 4094 - protein, 5 aa, ARTIFICIAL SEQUENCE
  Synthetic Construct
KGEDK

SEQ ID NO: 4095 - protein, 5 aa, ARTIFICIAL SEQUENCE
  Synthetic Construct
KGEEK

SEQ ID NO: 4096 - protein, 5 aa, ARTIFICIAL SEQUENCE
  Synthetic Construct
KGEFK

SEQ ID NO: 4097 - protein, 5 aa, ARTIFICIAL SEQUENCE
  Synthetic Construct
KGEGK

SEQ ID NO: 4098 - protein, 5 aa, ARTIFICIAL SEQUENCE
  Synthetic Construct
KGEHK

SEQ ID NO: 4099 - protein, 5 aa, ARTIFICIAL SEQUENCE
  Synthetic Construct
KGEIK

SEQ ID NO: 4100 - protein, 5 aa, ARTIFICIAL SEQUENCE
  Synthetic Construct
KGELK

SEQ ID NO: 4101 - protein, 5 aa, ARTIFICIAL SEQUENCE
  Synthetic Construct
KGENK

SEQ ID NO: 4102 - protein, 5 aa, ARTIFICIAL SEQUENCE
  Synthetic Construct
KGEQK

SEQ ID NO: 4103 - protein, 5 aa, ARTIFICIAL SEQUENCE
  Synthetic Construct
KGERK

SEQ ID NO: 4104 - protein, 5 aa, ARTIFICIAL SEQUENCE
  Synthetic Construct
KGESK

SEQ ID NO: 4105 - protein, 5 aa, ARTIFICIAL SEQUENCE
  Synthetic Construct
KGETK

SEQ ID NO: 4106 - protein, 5 aa, ARTIFICIAL SEQUENCE
  Synthetic Construct
KGEYK

SEQ ID NO: 4107 - protein, 5 aa, ARTIFICIAL SEQUENCE
  Synthetic Construct
KGFAK

SEQ ID NO: 4108 - protein, 5 aa, ARTIFICIAL SEQUENCE
  Synthetic Construct
KGFDK

SEQ ID NO: 4109 - protein, 5 aa, ARTIFICIAL SEQUENCE
  Synthetic Construct
KGFEK

SEQ ID NO: 4110 - protein, 5 aa, ARTIFICIAL SEQUENCE
  Synthetic Construct
KGFFK

SEQ ID NO: 4111 - protein, 5 aa, ARTIFICIAL SEQUENCE
  Synthetic Construct
KGFGK

SEQ ID NO: 4112 - protein, 5 aa, ARTIFICIAL SEQUENCE
  Synthetic Construct
KGFHK

SEQ ID NO: 4113 - protein, 5 aa, ARTIFICIAL SEQUENCE
  Synthetic Construct
KGFIK

SEQ ID NO: 4114 - protein, 5 aa, ARTIFICIAL SEQUENCE
  Synthetic Construct
KGFLK

SEQ ID NO: 4115 - protein, 5 aa, ARTIFICIAL SEQUENCE
  Synthetic Construct
KGFNK

SEQ ID NO: 4116 - protein, 5 aa, ARTIFICIAL SEQUENCE
  Synthetic Construct
KGFQK

SEQ ID NO: 4117 - protein, 5 aa, ARTIFICIAL SEQUENCE
  Synthetic Construct
KGFRK

SEQ ID NO: 4118 - protein, 5 aa, ARTIFICIAL SEQUENCE
  Synthetic Construct
KGFSK

SEQ ID NO: 4119 - protein, 5 aa, ARTIFICIAL SEQUENCE
  Synthetic Construct
KGFTK

SEQ ID NO: 4120 - protein, 5 aa, ARTIFICIAL SEQUENCE
  Synthetic Construct
KGFYK

SEQ ID NO: 4121 - protein, 5 aa, ARTIFICIAL SEQUENCE
  Synthetic Construct
KGGAK

SEQ ID NO: 4122 - protein, 5 aa, ARTIFICIAL SEQUENCE
  Synthetic Construct
KGGDK

SEQ ID NO: 4123 - protein, 5 aa, ARTIFICIAL SEQUENCE
  Synthetic Construct
KGGEK

SEQ ID NO: 4124 - protein, 5 aa, ARTIFICIAL SEQUENCE
  Synthetic Construct
KGGFK

SEQ ID NO: 4125 - protein, 5 aa, ARTIFICIAL SEQUENCE
  Synthetic Construct
KGGGK

SEQ ID NO: 4126 - protein, 5 aa, ARTIFICIAL SEQUENCE
  Synthetic Construct
KGGHK

SEQ ID NO: 4127 - protein, 5 aa, ARTIFICIAL SEQUENCE
  Synthetic Construct
KGGIK

SEQ ID NO: 4128 - protein, 5 aa, ARTIFICIAL SEQUENCE
  Synthetic Construct
KGGLK

SEQ ID NO: 4129 - protein, 5 aa, ARTIFICIAL SEQUENCE
  Synthetic Construct
KGGNK

SEQ ID NO: 4130 - protein, 5 aa, ARTIFICIAL SEQUENCE
  Synthetic Construct
KGGQK

SEQ ID NO: 4131 - protein, 5 aa, ARTIFICIAL SEQUENCE
  Synthetic Construct
KGGRK

SEQ ID NO: 4132 - protein, 5 aa, ARTIFICIAL SEQUENCE
  Synthetic Construct
KGGSK

SEQ ID NO: 4133 - protein, 5 aa, ARTIFICIAL SEQUENCE
  Synthetic Construct
KGGTK

SEQ ID NO: 4134 - protein, 5 aa, ARTIFICIAL SEQUENCE
  Synthetic Construct
KGGYK

SEQ ID NO: 4135 - protein, 5 aa, ARTIFICIAL SEQUENCE
  Synthetic Construct
KGHAK

SEQ ID NO: 4136 - protein, 5 aa, ARTIFICIAL SEQUENCE
  Synthetic Construct
KGHDK

SEQ ID NO: 4137 - protein, 5 aa, ARTIFICIAL SEQUENCE
  Synthetic Construct
KGHEK

SEQ ID NO: 4138 - protein, 5 aa, ARTIFICIAL SEQUENCE
  Synthetic Construct
KGHFK

SEQ ID NO: 4139 - protein, 5 aa, ARTIFICIAL SEQUENCE
  Synthetic Construct
KGHGK

SEQ ID NO: 4140 - protein, 5 aa, ARTIFICIAL SEQUENCE
  Synthetic Construct
KGHHK

SEQ ID NO: 4141 - protein, 5 aa, ARTIFICIAL SEQUENCE
  Synthetic Construct
KGHIK

SEQ ID NO: 4142 - protein, 5 aa, ARTIFICIAL SEQUENCE
  Synthetic Construct
KGHLK

SEQ ID NO: 4143 - protein, 5 aa, ARTIFICIAL SEQUENCE
  Synthetic Construct
KGHNK

SEQ ID NO: 4144 - protein, 5 aa, ARTIFICIAL SEQUENCE
  Synthetic Construct
KGHQK

SEQ ID NO: 4145 - protein, 5 aa, ARTIFICIAL SEQUENCE
  Synthetic Construct
KGHRK

SEQ ID NO: 4146 - protein, 5 aa, ARTIFICIAL SEQUENCE
  Synthetic Construct
KGHSK

SEQ ID NO: 4147 - protein, 5 aa, ARTIFICIAL SEQUENCE
  Synthetic Construct
KGHTK

SEQ ID NO: 4148 - protein, 5 aa, ARTIFICIAL SEQUENCE
  Synthetic Construct
KGHYK

SEQ ID NO: 4149 - protein, 5 aa, ARTIFICIAL SEQUENCE
  Synthetic Construct
KGIAK

SEQ ID NO: 4150 - protein, 5 aa, ARTIFICIAL SEQUENCE
  Synthetic Construct
KGIDK

SEQ ID NO: 4151 - protein, 5 aa, ARTIFICIAL SEQUENCE
  Synthetic Construct
KGIEK

SEQ ID NO: 4152 - protein, 5 aa, ARTIFICIAL SEQUENCE
  Synthetic Construct
KGIFK

SEQ ID NO: 4153 - protein, 5 aa, ARTIFICIAL SEQUENCE
  Synthetic Construct
KGIGK

SEQ ID NO: 4154 - protein, 5 aa, ARTIFICIAL SEQUENCE
  Synthetic Construct
KGIHK

SEQ ID NO: 4155 - protein, 5 aa, ARTIFICIAL SEQUENCE
  Synthetic Construct
KGIIK

SEQ ID NO: 4156 - protein, 5 aa, ARTIFICIAL SEQUENCE
  Synthetic Construct
KGILK

SEQ ID NO: 4157 - protein, 5 aa, ARTIFICIAL SEQUENCE
  Synthetic Construct
KGINK

SEQ ID NO: 4158 - protein, 5 aa, ARTIFICIAL SEQUENCE
  Synthetic Construct
KGIQK

SEQ ID NO: 4159 - protein, 5 aa, ARTIFICIAL SEQUENCE
  Synthetic Construct
KGIRK

SEQ ID NO: 4160 - protein, 5 aa, ARTIFICIAL SEQUENCE
  Synthetic Construct
KGISK

SEQ ID NO: 4161 - protein, 5 aa, ARTIFICIAL SEQUENCE
  Synthetic Construct
KGITK

SEQ ID NO: 4162 - protein, 5 aa, ARTIFICIAL SEQUENCE
  Synthetic Construct
KGIYK

SEQ ID NO: 4163 - protein, 5 aa, ARTIFICIAL SEQUENCE
  Synthetic Construct
KGLAK

SEQ ID NO: 4164 - protein, 5 aa, ARTIFICIAL SEQUENCE
  Synthetic Construct
KGLDK

SEQ ID NO: 4165 - protein, 5 aa, ARTIFICIAL SEQUENCE
  Synthetic Construct
KGLEK

SEQ ID NO: 4166 - protein, 5 aa, ARTIFICIAL SEQUENCE
  Synthetic Construct
KGLFK

SEQ ID NO: 4167 - protein, 5 aa, ARTIFICIAL SEQUENCE
  Synthetic Construct
KGLGK

SEQ ID NO: 4168 - protein, 5 aa, ARTIFICIAL SEQUENCE
  Synthetic Construct
KGLHK

SEQ ID NO: 4169 - protein, 5 aa, ARTIFICIAL SEQUENCE
  Synthetic Construct
KGLIK

SEQ ID NO: 4170 - protein, 5 aa, ARTIFICIAL SEQUENCE
  Synthetic Construct
KGLLK

SEQ ID NO: 4171 - protein, 5 aa, ARTIFICIAL SEQUENCE
  Synthetic Construct
KGLNK

SEQ ID NO: 4172 - protein, 5 aa, ARTIFICIAL SEQUENCE
  Synthetic Construct
KGLQK

SEQ ID NO: 4173 - protein, 5 aa, ARTIFICIAL SEQUENCE
  Synthetic Construct
KGLRK

SEQ ID NO: 4174 - protein, 5 aa, ARTIFICIAL SEQUENCE
  Synthetic Construct
KGLSK

SEQ ID NO: 4175 - protein, 5 aa, ARTIFICIAL SEQUENCE
  Synthetic Construct
KGLTK

SEQ ID NO: 4176 - protein, 5 aa, ARTIFICIAL SEQUENCE
  Synthetic Construct
KGLYK

SEQ ID NO: 4177 - protein, 5 aa, ARTIFICIAL SEQUENCE
  Synthetic Construct
KGNAK

SEQ ID NO: 4178 - protein, 5 aa, ARTIFICIAL SEQUENCE
  Synthetic Construct
KGNDK

SEQ ID NO: 4179 - protein, 5 aa, ARTIFICIAL SEQUENCE
  Synthetic Construct
KGNEK

SEQ ID NO: 4180 - protein, 5 aa, ARTIFICIAL SEQUENCE
  Synthetic Construct
KGNFK

SEQ ID NO: 4181 - protein, 5 aa, ARTIFICIAL SEQUENCE
  Synthetic Construct
KGNGK

SEQ ID NO: 4182 - protein, 5 aa, ARTIFICIAL SEQUENCE
  Synthetic Construct
KGNHK

SEQ ID NO: 4183 - protein, 5 aa, ARTIFICIAL SEQUENCE
  Synthetic Construct
KGNIK

SEQ ID NO: 4184 - protein, 5 aa, ARTIFICIAL SEQUENCE
  Synthetic Construct
KGNLK

SEQ ID NO: 4185 - protein, 5 aa, ARTIFICIAL SEQUENCE
  Synthetic Construct
KGNNK

SEQ ID NO: 4186 - protein, 5 aa, ARTIFICIAL SEQUENCE
  Synthetic Construct
KGNQK

SEQ ID NO: 4187 - protein, 5 aa, ARTIFICIAL SEQUENCE
  Synthetic Construct
KGNRK

SEQ ID NO: 4188 - protein, 5 aa, ARTIFICIAL SEQUENCE
  Synthetic Construct
KGNSK

SEQ ID NO: 4189 - protein, 5 aa, ARTIFICIAL SEQUENCE
  Synthetic Construct
KGNTK

SEQ ID NO: 4190 - protein, 5 aa, ARTIFICIAL SEQUENCE
  Synthetic Construct
KGNYK

SEQ ID NO: 4191 - protein, 5 aa, ARTIFICIAL SEQUENCE
  Synthetic Construct
KGPAK

SEQ ID NO: 4192 - protein, 5 aa, ARTIFICIAL SEQUENCE
  Synthetic Construct
KGPDK

SEQ ID NO: 4193 - protein, 5 aa, ARTIFICIAL SEQUENCE
  Synthetic Construct
KGPEK

SEQ ID NO: 4194 - protein, 5 aa, ARTIFICIAL SEQUENCE
  Synthetic Construct
KGPFK

SEQ ID NO: 4195 - protein, 5 aa, ARTIFICIAL SEQUENCE
  Synthetic Construct
KGPGK

SEQ ID NO: 4196 - protein, 5 aa, ARTIFICIAL SEQUENCE
  Synthetic Construct
KGPHK

SEQ ID NO: 4197 - protein, 5 aa, ARTIFICIAL SEQUENCE
  Synthetic Construct
KGPIK

SEQ ID NO: 4198 - protein, 5 aa, ARTIFICIAL SEQUENCE
  Synthetic Construct
KGPLK

SEQ ID NO: 4199 - protein, 5 aa, ARTIFICIAL SEQUENCE
  Synthetic Construct
KGPNK

SEQ ID NO: 4200 - protein, 5 aa, ARTIFICIAL SEQUENCE
  Synthetic Construct
KGPQK

SEQ ID NO: 4201 - protein, 5 aa, ARTIFICIAL SEQUENCE
  Synthetic Construct
KGPRK

SEQ ID NO: 4202 - protein, 5 aa, ARTIFICIAL SEQUENCE
  Synthetic Construct
KGPSK

SEQ ID NO: 4203 - protein, 5 aa, ARTIFICIAL SEQUENCE
  Synthetic Construct
KGPTK

SEQ ID NO: 4204 - protein, 5 aa, ARTIFICIAL SEQUENCE
  Synthetic Construct
KGPYK

SEQ ID NO: 4205 - protein, 5 aa, ARTIFICIAL SEQUENCE
  Synthetic Construct
KGQAK

SEQ ID NO: 4206 - protein, 5 aa, ARTIFICIAL SEQUENCE
  Synthetic Construct
KGQDK

SEQ ID NO: 4207 - protein, 5 aa, ARTIFICIAL SEQUENCE
  Synthetic Construct
KGQEK

SEQ ID NO: 4208 - protein, 5 aa, ARTIFICIAL SEQUENCE
  Synthetic Construct
KGQFK

SEQ ID NO: 4209 - protein, 5 aa, ARTIFICIAL SEQUENCE
  Synthetic Construct
KGQGK

SEQ ID NO: 4210 - protein, 5 aa, ARTIFICIAL SEQUENCE
  Synthetic Construct
KGQHK

SEQ ID NO: 4211 - protein, 5 aa, ARTIFICIAL SEQUENCE
  Synthetic Construct
KGQIK

SEQ ID NO: 4212 - protein, 5 aa, ARTIFICIAL SEQUENCE
  Synthetic Construct
KGQLK

SEQ ID NO: 4213 - protein, 5 aa, ARTIFICIAL SEQUENCE
  Synthetic Construct
KGQNK

SEQ ID NO: 4214 - protein, 5 aa, ARTIFICIAL SEQUENCE
  Synthetic Construct
KGQQK

SEQ ID NO: 4215 - protein, 5 aa, ARTIFICIAL SEQUENCE
  Synthetic Construct
KGQRK

SEQ ID NO: 4216 - protein, 5 aa, ARTIFICIAL SEQUENCE
  Synthetic Construct
KGQSK

SEQ ID NO: 4217 - protein, 5 aa, ARTIFICIAL SEQUENCE
  Synthetic Construct
KGQTK

SEQ ID NO: 4218 - protein, 5 aa, ARTIFICIAL SEQUENCE
  Synthetic Construct
KGQYK

SEQ ID NO: 4219 - protein, 5 aa, ARTIFICIAL SEQUENCE
  Synthetic Construct
KGRAK

SEQ ID NO: 4220 - protein, 5 aa, ARTIFICIAL SEQUENCE
  Synthetic Construct
KGRDK

SEQ ID NO: 4221 - protein, 5 aa, ARTIFICIAL SEQUENCE
  Synthetic Construct
KGREK

SEQ ID NO: 4222 - protein, 5 aa, ARTIFICIAL SEQUENCE
  Synthetic Construct
KGRFK

SEQ ID NO: 4223 - protein, 5 aa, ARTIFICIAL SEQUENCE
  Synthetic Construct
KGRGK

SEQ ID NO: 4224 - protein, 5 aa, ARTIFICIAL SEQUENCE
  Synthetic Construct
KGRHK

SEQ ID NO: 4225 - protein, 5 aa, ARTIFICIAL SEQUENCE
  Synthetic Construct
KGRIK

SEQ ID NO: 4226 - protein, 5 aa, ARTIFICIAL SEQUENCE
  Synthetic Construct
KGRLK

SEQ ID NO: 4227 - protein, 5 aa, ARTIFICIAL SEQUENCE
  Synthetic Construct
KGRNK

SEQ ID NO: 4228 - protein, 5 aa, ARTIFICIAL SEQUENCE
  Synthetic Construct
KGRQK

SEQ ID NO: 4229 - protein, 5 aa, ARTIFICIAL SEQUENCE
  Synthetic Construct
KGRRK

SEQ ID NO: 4230 - protein, 5 aa, ARTIFICIAL SEQUENCE
  Synthetic Construct
KGRSK

SEQ ID NO: 4231 - protein, 5 aa, ARTIFICIAL SEQUENCE
  Synthetic Construct
KGRTK

SEQ ID NO: 4232 - protein, 5 aa, ARTIFICIAL SEQUENCE
  Synthetic Construct
KGRYK

SEQ ID NO: 4233 - protein, 5 aa, ARTIFICIAL SEQUENCE
  Synthetic Construct
KGSAK

SEQ ID NO: 4234 - protein, 5 aa, ARTIFICIAL SEQUENCE
  Synthetic Construct
KGSDK

SEQ ID NO: 4235 - protein, 5 aa, ARTIFICIAL SEQUENCE
  Synthetic Construct
KGSEK

SEQ ID NO: 4236 - protein, 5 aa, ARTIFICIAL SEQUENCE
  Synthetic Construct
KGSFK

SEQ ID NO: 4237 - protein, 5 aa, ARTIFICIAL SEQUENCE
  Synthetic Construct
KGSGK

SEQ ID NO: 4238 - protein, 5 aa, ARTIFICIAL SEQUENCE
  Synthetic Construct
KGSHK

SEQ ID NO: 4239 - protein, 5 aa, ARTIFICIAL SEQUENCE
  Synthetic Construct
KGSIK

SEQ ID NO: 4240 - protein, 5 aa, ARTIFICIAL SEQUENCE
  Synthetic Construct
KGSLK

SEQ ID NO: 4241 - protein, 5 aa, ARTIFICIAL SEQUENCE
  Synthetic Construct
KGSNK

SEQ ID NO: 4242 - protein, 5 aa, ARTIFICIAL SEQUENCE
  Synthetic Construct
KGSQK

SEQ ID NO: 4243 - protein, 5 aa, ARTIFICIAL SEQUENCE
  Synthetic Construct
KGSRK

SEQ ID NO: 4244 - protein, 5 aa, ARTIFICIAL SEQUENCE
  Synthetic Construct
KGSSK

SEQ ID NO: 4245 - protein, 5 aa, ARTIFICIAL SEQUENCE
  Synthetic Construct
KGSTK

SEQ ID NO: 4246 - protein, 5 aa, ARTIFICIAL SEQUENCE
  Synthetic Construct
KGSYK

SEQ ID NO: 4247 - protein, 5 aa, ARTIFICIAL SEQUENCE
  Synthetic Construct
KGTAK

SEQ ID NO: 4248 - protein, 5 aa, ARTIFICIAL SEQUENCE
  Synthetic Construct
KGTDK

SEQ ID NO: 4249 - protein, 5 aa, ARTIFICIAL SEQUENCE
  Synthetic Construct
KGTEK

SEQ ID NO: 4250 - protein, 5 aa, ARTIFICIAL SEQUENCE
  Synthetic Construct
KGTFK

SEQ ID NO: 4251 - protein, 5 aa, ARTIFICIAL SEQUENCE
  Synthetic Construct
KGTGK

SEQ ID NO: 4252 - protein, 5 aa, ARTIFICIAL SEQUENCE
  Synthetic Construct
KGTHK

SEQ ID NO: 4253 - protein, 5 aa, ARTIFICIAL SEQUENCE
  Synthetic Construct
KGTIK

SEQ ID NO: 4254 - protein, 5 aa, ARTIFICIAL SEQUENCE
  Synthetic Construct
KGTLK

SEQ ID NO: 4255 - protein, 5 aa, ARTIFICIAL SEQUENCE
  Synthetic Construct
KGTNK

SEQ ID NO: 4256 - protein, 5 aa, ARTIFICIAL SEQUENCE
  Synthetic Construct
KGTQK

SEQ ID NO: 4257 - protein, 5 aa, ARTIFICIAL SEQUENCE
  Synthetic Construct
KGTRK

SEQ ID NO: 4258 - protein, 5 aa, ARTIFICIAL SEQUENCE
  Synthetic Construct
KGTSK

SEQ ID NO: 4259 - protein, 5 aa, ARTIFICIAL SEQUENCE
  Synthetic Construct
KGTTK

SEQ ID NO: 4260 - protein, 5 aa, ARTIFICIAL SEQUENCE
  Synthetic Construct
KGTYK

SEQ ID NO: 4261 - protein, 5 aa, ARTIFICIAL SEQUENCE
  Synthetic Construct
KGYAK

SEQ ID NO: 4262 - protein, 5 aa, ARTIFICIAL SEQUENCE
  Synthetic Construct
KGYDK

SEQ ID NO: 4263 - protein, 5 aa, ARTIFICIAL SEQUENCE
  Synthetic Construct
KGYEK

SEQ ID NO: 4264 - protein, 5 aa, ARTIFICIAL SEQUENCE
  Synthetic Construct
KGYFK

SEQ ID NO: 4265 - protein, 5 aa, ARTIFICIAL SEQUENCE
  Synthetic Construct
KGYGK

SEQ ID NO: 4266 - protein, 5 aa, ARTIFICIAL SEQUENCE
  Synthetic Construct
KGYHK

SEQ ID NO: 4267 - protein, 5 aa, ARTIFICIAL SEQUENCE
  Synthetic Construct
KGYIK

SEQ ID NO: 4268 - protein, 5 aa, ARTIFICIAL SEQUENCE
  Synthetic Construct
KGYLK

SEQ ID NO: 4269 - protein, 5 aa, ARTIFICIAL SEQUENCE
  Synthetic Construct
KGYNK

SEQ ID NO: 4270 - protein, 5 aa, ARTIFICIAL SEQUENCE
  Synthetic Construct
KGYQK

SEQ ID NO: 4271 - protein, 5 aa, ARTIFICIAL SEQUENCE
  Synthetic Construct
KGYRK

SEQ ID NO: 4272 - protein, 5 aa, ARTIFICIAL SEQUENCE
  Synthetic Construct
KGYSK

SEQ ID NO: 4273 - protein, 5 aa, ARTIFICIAL SEQUENCE
  Synthetic Construct
KGYTK

SEQ ID NO: 4274 - protein, 5 aa, ARTIFICIAL SEQUENCE
  Synthetic Construct
KGYYK

SEQ ID NO: 4275 - protein, 5 aa, ARTIFICIAL SEQUENCE
  Synthetic Construct
KHAAK

SEQ ID NO: 4276 - protein, 5 aa, ARTIFICIAL SEQUENCE
  Synthetic Construct
KHADK

SEQ ID NO: 4277 - protein, 5 aa, ARTIFICIAL SEQUENCE
  Synthetic Construct
KHAEK

SEQ ID NO: 4278 - protein, 5 aa, ARTIFICIAL SEQUENCE
  Synthetic Construct
KHAFK

SEQ ID NO: 4279 - protein, 5 aa, ARTIFICIAL SEQUENCE
  Synthetic Construct
KHAGK

SEQ ID NO: 4280 - protein, 5 aa, ARTIFICIAL SEQUENCE
  Synthetic Construct
KHAHK

SEQ ID NO: 4281 - protein, 5 aa, ARTIFICIAL SEQUENCE
  Synthetic Construct
KHAIK

SEQ ID NO: 4282 - protein, 5 aa, ARTIFICIAL SEQUENCE
  Synthetic Construct
KHALK

SEQ ID NO: 4283 - protein, 5 aa, ARTIFICIAL SEQUENCE
  Synthetic Construct
KHANK

SEQ ID NO: 4284 - protein, 5 aa, ARTIFICIAL SEQUENCE
  Synthetic Construct
KHAQK

SEQ ID NO: 4285 - protein, 5 aa, ARTIFICIAL SEQUENCE
  Synthetic Construct
KHARK

SEQ ID NO: 4286 - protein, 5 aa, ARTIFICIAL SEQUENCE
  Synthetic Construct
KHASK

SEQ ID NO: 4287 - protein, 5 aa, ARTIFICIAL SEQUENCE
  Synthetic Construct
KHATK

SEQ ID NO: 4288 - protein, 5 aa, ARTIFICIAL SEQUENCE
  Synthetic Construct
KHAYK

SEQ ID NO: 4289 - protein, 5 aa, ARTIFICIAL SEQUENCE
  Synthetic Construct
KHDAK

SEQ ID NO: 4290 - protein, 5 aa, ARTIFICIAL SEQUENCE
  Synthetic Construct
KHDDK

SEQ ID NO: 4291 - protein, 5 aa, ARTIFICIAL SEQUENCE
  Synthetic Construct
KHDEK

SEQ ID NO: 4292 - protein, 5 aa, ARTIFICIAL SEQUENCE
  Synthetic Construct
KHDFK

SEQ ID NO: 4293 - protein, 5 aa, ARTIFICIAL SEQUENCE
  Synthetic Construct
KHDGK

SEQ ID NO: 4294 - protein, 5 aa, ARTIFICIAL SEQUENCE
  Synthetic Construct
KHDHK

SEQ ID NO: 4295 - protein, 5 aa, ARTIFICIAL SEQUENCE
  Synthetic Construct
KHDIK

SEQ ID NO: 4296 - protein, 5 aa, ARTIFICIAL SEQUENCE
  Synthetic Construct
KHDLK

SEQ ID NO: 4297 - protein, 5 aa, ARTIFICIAL SEQUENCE
  Synthetic Construct
KHDNK

SEQ ID NO: 4298 - protein, 5 aa, ARTIFICIAL SEQUENCE
  Synthetic Construct
KHDQK

SEQ ID NO: 4299 - protein, 5 aa, ARTIFICIAL SEQUENCE
  Synthetic Construct
KHDRK

SEQ ID NO: 4300 - protein, 5 aa, ARTIFICIAL SEQUENCE
  Synthetic Construct
KHDSK

SEQ ID NO: 4301 - protein, 5 aa, ARTIFICIAL SEQUENCE
  Synthetic Construct
KHDTK

SEQ ID NO: 4302 - protein, 5 aa, ARTIFICIAL SEQUENCE
  Synthetic Construct
KHDYK

SEQ ID NO: 4303 - protein, 5 aa, ARTIFICIAL SEQUENCE
  Synthetic Construct
KHEAK

SEQ ID NO: 4304 - protein, 5 aa, ARTIFICIAL SEQUENCE
  Synthetic Construct
KHEDK

SEQ ID NO: 4305 - protein, 5 aa, ARTIFICIAL SEQUENCE
  Synthetic Construct
KHEEK

SEQ ID NO: 4306 - protein, 5 aa, ARTIFICIAL SEQUENCE
  Synthetic Construct
KHEFK

SEQ ID NO: 4307 - protein, 5 aa, ARTIFICIAL SEQUENCE
  Synthetic Construct
KHEGK

SEQ ID NO: 4308 - protein, 5 aa, ARTIFICIAL SEQUENCE
  Synthetic Construct
KHEHK

SEQ ID NO: 4309 - protein, 5 aa, ARTIFICIAL SEQUENCE
  Synthetic Construct
KHEIK

SEQ ID NO: 4310 - protein, 5 aa, ARTIFICIAL SEQUENCE
  Synthetic Construct
KHELK

SEQ ID NO: 4311 - protein, 5 aa, ARTIFICIAL SEQUENCE
  Synthetic Construct
KHENK

SEQ ID NO: 4312 - protein, 5 aa, ARTIFICIAL SEQUENCE
  Synthetic Construct
KHEQK

SEQ ID NO: 4313 - protein, 5 aa, ARTIFICIAL SEQUENCE
  Synthetic Construct
KHERK

SEQ ID NO: 4314 - protein, 5 aa, ARTIFICIAL SEQUENCE
  Synthetic Construct
KHESK

SEQ ID NO: 4315 - protein, 5 aa, ARTIFICIAL SEQUENCE
  Synthetic Construct
KHETK

SEQ ID NO: 4316 - protein, 5 aa, ARTIFICIAL SEQUENCE
  Synthetic Construct
KHEYK

SEQ ID NO: 4317 - protein, 5 aa, ARTIFICIAL SEQUENCE
  Synthetic Construct
KHFAK

SEQ ID NO: 4318 - protein, 5 aa, ARTIFICIAL SEQUENCE
  Synthetic Construct
KHFDK

SEQ ID NO: 4319 - protein, 5 aa, ARTIFICIAL SEQUENCE
  Synthetic Construct
KHFEK

SEQ ID NO: 4320 - protein, 5 aa, ARTIFICIAL SEQUENCE
  Synthetic Construct
KHFFK

SEQ ID NO: 4321 - protein, 5 aa, ARTIFICIAL SEQUENCE
  Synthetic Construct
KHFGK

SEQ ID NO: 4322 - protein, 5 aa, ARTIFICIAL SEQUENCE
  Synthetic Construct
KHFHK

SEQ ID NO: 4323 - protein, 5 aa, ARTIFICIAL SEQUENCE
  Synthetic Construct
KHFIK

SEQ ID NO: 4324 - protein, 5 aa, ARTIFICIAL SEQUENCE
  Synthetic Construct
KHFLK

SEQ ID NO: 4325 - protein, 5 aa, ARTIFICIAL SEQUENCE
  Synthetic Construct
KHFNK

SEQ ID NO: 4326 - protein, 5 aa, ARTIFICIAL SEQUENCE
  Synthetic Construct
KHFQK

SEQ ID NO: 4327 - protein, 5 aa, ARTIFICIAL SEQUENCE
  Synthetic Construct
KHFRK

SEQ ID NO: 4328 - protein, 5 aa, ARTIFICIAL SEQUENCE
  Synthetic Construct
KHFSK

SEQ ID NO: 4329 - protein, 5 aa, ARTIFICIAL SEQUENCE
  Synthetic Construct
KHFTK

SEQ ID NO: 4330 - protein, 5 aa, ARTIFICIAL SEQUENCE
  Synthetic Construct
KHFYK

SEQ ID NO: 4331 - protein, 5 aa, ARTIFICIAL SEQUENCE
  Synthetic Construct
KHGAK

SEQ ID NO: 4332 - protein, 5 aa, ARTIFICIAL SEQUENCE
  Synthetic Construct
KHGDK

SEQ ID NO: 4333 - protein, 5 aa, ARTIFICIAL SEQUENCE
  Synthetic Construct
KHGEK

SEQ ID NO: 4334 - protein, 5 aa, ARTIFICIAL SEQUENCE
  Synthetic Construct
KHGFK

SEQ ID NO: 4335 - protein, 5 aa, ARTIFICIAL SEQUENCE
  Synthetic Construct
KHGGK

SEQ ID NO: 4336 - protein, 5 aa, ARTIFICIAL SEQUENCE
  Synthetic Construct
KHGHK

SEQ ID NO: 4337 - protein, 5 aa, ARTIFICIAL SEQUENCE
  Synthetic Construct
KHGIK

SEQ ID NO: 4338 - protein, 5 aa, ARTIFICIAL SEQUENCE
  Synthetic Construct
KHGLK

SEQ ID NO: 4339 - protein, 5 aa, ARTIFICIAL SEQUENCE
  Synthetic Construct
KHGNK

SEQ ID NO: 4340 - protein, 5 aa, ARTIFICIAL SEQUENCE
  Synthetic Construct
KHGQK

SEQ ID NO: 4341 - protein, 5 aa, ARTIFICIAL SEQUENCE
  Synthetic Construct
KHGRK

SEQ ID NO: 4342 - protein, 5 aa, ARTIFICIAL SEQUENCE
  Synthetic Construct
KHGSK

SEQ ID NO: 4343 - protein, 5 aa, ARTIFICIAL SEQUENCE
  Synthetic Construct
KHGTK

SEQ ID NO: 4344 - protein, 5 aa, ARTIFICIAL SEQUENCE
  Synthetic Construct
KHGYK

SEQ ID NO: 4345 - protein, 5 aa, ARTIFICIAL SEQUENCE
  Synthetic Construct
KHHAK

SEQ ID NO: 4346 - protein, 5 aa, ARTIFICIAL SEQUENCE
  Synthetic Construct
KHHDK

SEQ ID NO: 4347 - protein, 5 aa, ARTIFICIAL SEQUENCE
  Synthetic Construct
KHHEK

SEQ ID NO: 4348 - protein, 5 aa, ARTIFICIAL SEQUENCE
  Synthetic Construct
KHHFK

SEQ ID NO: 4349 - protein, 5 aa, ARTIFICIAL SEQUENCE
  Synthetic Construct
KHHGK

SEQ ID NO: 4350 - protein, 5 aa, ARTIFICIAL SEQUENCE
  Synthetic Construct
KHHHK

SEQ ID NO: 4351 - protein, 5 aa, ARTIFICIAL SEQUENCE
  Synthetic Construct
KHHIK

SEQ ID NO: 4352 - protein, 5 aa, ARTIFICIAL SEQUENCE
  Synthetic Construct
KHHLK

SEQ ID NO: 4353 - protein, 5 aa, ARTIFICIAL SEQUENCE
  Synthetic Construct
KHHNK

SEQ ID NO: 4354 - protein, 5 aa, ARTIFICIAL SEQUENCE
  Synthetic Construct
KHHQK

SEQ ID NO: 4355 - protein, 5 aa, ARTIFICIAL SEQUENCE
  Synthetic Construct
KHHRK

SEQ ID NO: 4356 - protein, 5 aa, ARTIFICIAL SEQUENCE
  Synthetic Construct
KHHSK

SEQ ID NO: 4357 - protein, 5 aa, ARTIFICIAL SEQUENCE
  Synthetic Construct
KHHTK

SEQ ID NO: 4358 - protein, 5 aa, ARTIFICIAL SEQUENCE
  Synthetic Construct
KHHYK

SEQ ID NO: 4359 - protein, 5 aa, ARTIFICIAL SEQUENCE
  Synthetic Construct
KHIAK

SEQ ID NO: 4360 - protein, 5 aa, ARTIFICIAL SEQUENCE
  Synthetic Construct
KHIDK

SEQ ID NO: 4361 - protein, 5 aa, ARTIFICIAL SEQUENCE
  Synthetic Construct
KHIEK

SEQ ID NO: 4362 - protein, 5 aa, ARTIFICIAL SEQUENCE
  Synthetic Construct
KHIFK

SEQ ID NO: 4363 - protein, 5 aa, ARTIFICIAL SEQUENCE
  Synthetic Construct
KHIGK

SEQ ID NO: 4364 - protein, 5 aa, ARTIFICIAL SEQUENCE
  Synthetic Construct
KHIHK

SEQ ID NO: 4365 - protein, 5 aa, ARTIFICIAL SEQUENCE
  Synthetic Construct
KHIIK

SEQ ID NO: 4366 - protein, 5 aa, ARTIFICIAL SEQUENCE
  Synthetic Construct
KHILK

SEQ ID NO: 4367 - protein, 5 aa, ARTIFICIAL SEQUENCE
  Synthetic Construct
KHINK

SEQ ID NO: 4368 - protein, 5 aa, ARTIFICIAL SEQUENCE
  Synthetic Construct
KHIQK

SEQ ID NO: 4369 - protein, 5 aa, ARTIFICIAL SEQUENCE
  Synthetic Construct
KHIRK

SEQ ID NO: 4370 - protein, 5 aa, ARTIFICIAL SEQUENCE
  Synthetic Construct
KHISK

SEQ ID NO: 4371 - protein, 5 aa, ARTIFICIAL SEQUENCE
  Synthetic Construct
KHITK

SEQ ID NO: 4372 - protein, 5 aa, ARTIFICIAL SEQUENCE
  Synthetic Construct
KHIYK

SEQ ID NO: 4373 - protein, 5 aa, ARTIFICIAL SEQUENCE
  Synthetic Construct
KHLAK

SEQ ID NO: 4374 - protein, 5 aa, ARTIFICIAL SEQUENCE
  Synthetic Construct
KHLDK

SEQ ID NO: 4375 - protein, 5 aa, ARTIFICIAL SEQUENCE
  Synthetic Construct
KHLEK

SEQ ID NO: 4376 - protein, 5 aa, ARTIFICIAL SEQUENCE
  Synthetic Construct
KHLFK

SEQ ID NO: 4377 - protein, 5 aa, ARTIFICIAL SEQUENCE
  Synthetic Construct
KHLGK

SEQ ID NO: 4378 - protein, 5 aa, ARTIFICIAL SEQUENCE
  Synthetic Construct
KHLHK

SEQ ID NO: 4379 - protein, 5 aa, ARTIFICIAL SEQUENCE
  Synthetic Construct
KHLIK

SEQ ID NO: 4380 - protein, 5 aa, ARTIFICIAL SEQUENCE
  Synthetic Construct
KHLLK

SEQ ID NO: 4381 - protein, 5 aa, ARTIFICIAL SEQUENCE
  Synthetic Construct
KHLNK

SEQ ID NO: 4382 - protein, 5 aa, ARTIFICIAL SEQUENCE
  Synthetic Construct
KHLQK

SEQ ID NO: 4383 - protein, 5 aa, ARTIFICIAL SEQUENCE
  Synthetic Construct
KHLRK

SEQ ID NO: 4384 - protein, 5 aa, ARTIFICIAL SEQUENCE
  Synthetic Construct
KHLSK

SEQ ID NO: 4385 - protein, 5 aa, ARTIFICIAL SEQUENCE
  Synthetic Construct
KHLTK

SEQ ID NO: 4386 - protein, 5 aa, ARTIFICIAL SEQUENCE
  Synthetic Construct
KHLYK

SEQ ID NO: 4387 - protein, 5 aa, ARTIFICIAL SEQUENCE
  Synthetic Construct
KHNAK

SEQ ID NO: 4388 - protein, 5 aa, ARTIFICIAL SEQUENCE
  Synthetic Construct
KHNDK

SEQ ID NO: 4389 - protein, 5 aa, ARTIFICIAL SEQUENCE
  Synthetic Construct
KHNEK

SEQ ID NO: 4390 - protein, 5 aa, ARTIFICIAL SEQUENCE
  Synthetic Construct
KHNFK

SEQ ID NO: 4391 - protein, 5 aa, ARTIFICIAL SEQUENCE
  Synthetic Construct
KHNGK

SEQ ID NO: 4392 - protein, 5 aa, ARTIFICIAL SEQUENCE
  Synthetic Construct
KHNHK

SEQ ID NO: 4393 - protein, 5 aa, ARTIFICIAL SEQUENCE
  Synthetic Construct
KHNIK

SEQ ID NO: 4394 - protein, 5 aa, ARTIFICIAL SEQUENCE
  Synthetic Construct
KHNLK

SEQ ID NO: 4395 - protein, 5 aa, ARTIFICIAL SEQUENCE
  Synthetic Construct
KHNNK

SEQ ID NO: 4396 - protein, 5 aa, ARTIFICIAL SEQUENCE
  Synthetic Construct
KHNQK

SEQ ID NO: 4397 - protein, 5 aa, ARTIFICIAL SEQUENCE
  Synthetic Construct
KHNRK

SEQ ID NO: 4398 - protein, 5 aa, ARTIFICIAL SEQUENCE
  Synthetic Construct
KHNSK

SEQ ID NO: 4399 - protein, 5 aa, ARTIFICIAL SEQUENCE
  Synthetic Construct
KHNTK

SEQ ID NO: 4400 - protein, 5 aa, ARTIFICIAL SEQUENCE
  Synthetic Construct
KHNYK

SEQ ID NO: 4401 - protein, 5 aa, ARTIFICIAL SEQUENCE
  Synthetic Construct
KHPAK

SEQ ID NO: 4402 - protein, 5 aa, ARTIFICIAL SEQUENCE
  Synthetic Construct
KHPDK

SEQ ID NO: 4403 - protein, 5 aa, ARTIFICIAL SEQUENCE
  Synthetic Construct
KHPEK

SEQ ID NO: 4404 - protein, 5 aa, ARTIFICIAL SEQUENCE
  Synthetic Construct
KHPFK

SEQ ID NO: 4405 - protein, 5 aa, ARTIFICIAL SEQUENCE
  Synthetic Construct
KHPGK

SEQ ID NO: 4406 - protein, 5 aa, ARTIFICIAL SEQUENCE
  Synthetic Construct
KHPHK

SEQ ID NO: 4407 - protein, 5 aa, ARTIFICIAL SEQUENCE
  Synthetic Construct
KHPIK

SEQ ID NO: 4408 - protein, 5 aa, ARTIFICIAL SEQUENCE
  Synthetic Construct
KHPLK

SEQ ID NO: 4409 - protein, 5 aa, ARTIFICIAL SEQUENCE
  Synthetic Construct
KHPNK

SEQ ID NO: 4410 - protein, 5 aa, ARTIFICIAL SEQUENCE
  Synthetic Construct
KHPQK

SEQ ID NO: 4411 - protein, 5 aa, ARTIFICIAL SEQUENCE
  Synthetic Construct
KHPRK

SEQ ID NO: 4412 - protein, 5 aa, ARTIFICIAL SEQUENCE
  Synthetic Construct
KHPSK

SEQ ID NO: 4413 - protein, 5 aa, ARTIFICIAL SEQUENCE
  Synthetic Construct
KHPTK

SEQ ID NO: 4414 - protein, 5 aa, ARTIFICIAL SEQUENCE
  Synthetic Construct
KHPYK

SEQ ID NO: 4415 - protein, 5 aa, ARTIFICIAL SEQUENCE
  Synthetic Construct
KHQAK

SEQ ID NO: 4416 - protein, 5 aa, ARTIFICIAL SEQUENCE
  Synthetic Construct
KHQDK

SEQ ID NO: 4417 - protein, 5 aa, ARTIFICIAL SEQUENCE
  Synthetic Construct
KHQEK

SEQ ID NO: 4418 - protein, 5 aa, ARTIFICIAL SEQUENCE
  Synthetic Construct
KHQFK

SEQ ID NO: 4419 - protein, 5 aa, ARTIFICIAL SEQUENCE
  Synthetic Construct
KHQGK

SEQ ID NO: 4420 - protein, 5 aa, ARTIFICIAL SEQUENCE
  Synthetic Construct
KHQHK

SEQ ID NO: 4421 - protein, 5 aa, ARTIFICIAL SEQUENCE
  Synthetic Construct
KHQIK

SEQ ID NO: 4422 - protein, 5 aa, ARTIFICIAL SEQUENCE
  Synthetic Construct
KHQLK

SEQ ID NO: 4423 - protein, 5 aa, ARTIFICIAL SEQUENCE
  Synthetic Construct
KHQNK

SEQ ID NO: 4424 - protein, 5 aa, ARTIFICIAL SEQUENCE
  Synthetic Construct
KHQQK

SEQ ID NO: 4425 - protein, 5 aa, ARTIFICIAL SEQUENCE
  Synthetic Construct
KHQRK

SEQ ID NO: 4426 - protein, 5 aa, ARTIFICIAL SEQUENCE
  Synthetic Construct
KHQSK

SEQ ID NO: 4427 - protein, 5 aa, ARTIFICIAL SEQUENCE
  Synthetic Construct
KHQTK

SEQ ID NO: 4428 - protein, 5 aa, ARTIFICIAL SEQUENCE
  Synthetic Construct
KHQYK

SEQ ID NO: 4429 - protein, 5 aa, ARTIFICIAL SEQUENCE
  Synthetic Construct
KHRAK

SEQ ID NO: 4430 - protein, 5 aa, ARTIFICIAL SEQUENCE
  Synthetic Construct
KHRDK

SEQ ID NO: 4431 - protein, 5 aa, ARTIFICIAL SEQUENCE
  Synthetic Construct
KHREK

SEQ ID NO: 4432 - protein, 5 aa, ARTIFICIAL SEQUENCE
  Synthetic Construct
KHRFK

SEQ ID NO: 4433 - protein, 5 aa, ARTIFICIAL SEQUENCE
  Synthetic Construct
KHRGK

SEQ ID NO: 4434 - protein, 5 aa, ARTIFICIAL SEQUENCE
  Synthetic Construct
KHRHK

SEQ ID NO: 4435 - protein, 5 aa, ARTIFICIAL SEQUENCE
  Synthetic Construct
KHRIK

SEQ ID NO: 4436 - protein, 5 aa, ARTIFICIAL SEQUENCE
  Synthetic Construct
KHRLK

SEQ ID NO: 4437 - protein, 5 aa, ARTIFICIAL SEQUENCE
  Synthetic Construct
KHRNK

SEQ ID NO: 4438 - protein, 5 aa, ARTIFICIAL SEQUENCE
  Synthetic Construct
KHRQK

SEQ ID NO: 4439 - protein, 5 aa, ARTIFICIAL SEQUENCE
  Synthetic Construct
KHRRK

SEQ ID NO: 4440 - protein, 5 aa, ARTIFICIAL SEQUENCE
  Synthetic Construct
KHRSK

SEQ ID NO: 4441 - protein, 5 aa, ARTIFICIAL SEQUENCE
  Synthetic Construct
KHRTK

SEQ ID NO: 4442 - protein, 5 aa, ARTIFICIAL SEQUENCE
  Synthetic Construct
KHRYK

SEQ ID NO: 4443 - protein, 5 aa, ARTIFICIAL SEQUENCE
  Synthetic Construct
KHSAK

SEQ ID NO: 4444 - protein, 5 aa, ARTIFICIAL SEQUENCE
  Synthetic Construct
KHSDK

SEQ ID NO: 4445 - protein, 5 aa, ARTIFICIAL SEQUENCE
  Synthetic Construct
KHSEK

SEQ ID NO: 4446 - protein, 5 aa, ARTIFICIAL SEQUENCE
  Synthetic Construct
KHSFK

SEQ ID NO: 4447 - protein, 5 aa, ARTIFICIAL SEQUENCE
  Synthetic Construct
KHSGK

SEQ ID NO: 4448 - protein, 5 aa, ARTIFICIAL SEQUENCE
  Synthetic Construct
KHSHK

SEQ ID NO: 4449 - protein, 5 aa, ARTIFICIAL SEQUENCE
  Synthetic Construct
KHSIK

SEQ ID NO: 4450 - protein, 5 aa, ARTIFICIAL SEQUENCE
  Synthetic Construct
KHSLK

SEQ ID NO: 4451 - protein, 5 aa, ARTIFICIAL SEQUENCE
  Synthetic Construct
KHSNK

SEQ ID NO: 4452 - protein, 5 aa, ARTIFICIAL SEQUENCE
  Synthetic Construct
KHSQK

SEQ ID NO: 4453 - protein, 5 aa, ARTIFICIAL SEQUENCE
  Synthetic Construct
KHSRK

SEQ ID NO: 4454 - protein, 5 aa, ARTIFICIAL SEQUENCE
  Synthetic Construct
KHSSK

SEQ ID NO: 4455 - protein, 5 aa, ARTIFICIAL SEQUENCE
  Synthetic Construct
KHSTK

SEQ ID NO: 4456 - protein, 5 aa, ARTIFICIAL SEQUENCE
  Synthetic Construct
KHSYK

SEQ ID NO: 4457 - protein, 5 aa, ARTIFICIAL SEQUENCE
  Synthetic Construct
KHTAK

SEQ ID NO: 4458 - protein, 5 aa, ARTIFICIAL SEQUENCE
  Synthetic Construct
KHTDK

SEQ ID NO: 4459 - protein, 5 aa, ARTIFICIAL SEQUENCE
  Synthetic Construct
KHTEK

SEQ ID NO: 4460 - protein, 5 aa, ARTIFICIAL SEQUENCE
  Synthetic Construct
KHTFK

SEQ ID NO: 4461 - protein, 5 aa, ARTIFICIAL SEQUENCE
  Synthetic Construct
KHTGK

SEQ ID NO: 4462 - protein, 5 aa, ARTIFICIAL SEQUENCE
  Synthetic Construct
KHTHK

SEQ ID NO: 4463 - protein, 5 aa, ARTIFICIAL SEQUENCE
  Synthetic Construct
KHTIK

SEQ ID NO: 4464 - protein, 5 aa, ARTIFICIAL SEQUENCE
  Synthetic Construct
KHTLK

SEQ ID NO: 4465 - protein, 5 aa, ARTIFICIAL SEQUENCE
  Synthetic Construct
KHTNK

SEQ ID NO: 4466 - protein, 5 aa, ARTIFICIAL SEQUENCE
  Synthetic Construct
KHTQK

SEQ ID NO: 4467 - protein, 5 aa, ARTIFICIAL SEQUENCE
  Synthetic Construct
KHTRK

SEQ ID NO: 4468 - protein, 5 aa, ARTIFICIAL SEQUENCE
  Synthetic Construct
KHTSK

SEQ ID NO: 4469 - protein, 5 aa, ARTIFICIAL SEQUENCE
  Synthetic Construct
KHTTK

SEQ ID NO: 4470 - protein, 5 aa, ARTIFICIAL SEQUENCE
  Synthetic Construct
KHTYK

SEQ ID NO: 4471 - protein, 5 aa, ARTIFICIAL SEQUENCE
  Synthetic Construct
KHYAK

SEQ ID NO: 4472 - protein, 5 aa, ARTIFICIAL SEQUENCE
  Synthetic Construct
KHYDK

SEQ ID NO: 4473 - protein, 5 aa, ARTIFICIAL SEQUENCE
  Synthetic Construct
KHYEK

SEQ ID NO: 4474 - protein, 5 aa, ARTIFICIAL SEQUENCE
  Synthetic Construct
KHYFK

SEQ ID NO: 4475 - protein, 5 aa, ARTIFICIAL SEQUENCE
  Synthetic Construct
KHYGK

SEQ ID NO: 4476 - protein, 5 aa, ARTIFICIAL SEQUENCE
  Synthetic Construct
KHYHK

SEQ ID NO: 4477 - protein, 5 aa, ARTIFICIAL SEQUENCE
  Synthetic Construct
KHYIK

SEQ ID NO: 4478 - protein, 5 aa, ARTIFICIAL SEQUENCE
  Synthetic Construct
KHYLK

SEQ ID NO: 4479 - protein, 5 aa, ARTIFICIAL SEQUENCE
  Synthetic Construct
KHYNK

SEQ ID NO: 4480 - protein, 5 aa, ARTIFICIAL SEQUENCE
  Synthetic Construct
KHYQK

SEQ ID NO: 4481 - protein, 5 aa, ARTIFICIAL SEQUENCE
  Synthetic Construct
KHYRK

SEQ ID NO: 4482 - protein, 5 aa, ARTIFICIAL SEQUENCE
  Synthetic Construct
KHYSK

SEQ ID NO: 4483 - protein, 5 aa, ARTIFICIAL SEQUENCE
  Synthetic Construct
KHYTK

SEQ ID NO: 4484 - protein, 5 aa, ARTIFICIAL SEQUENCE
  Synthetic Construct
KHYYK

SEQ ID NO: 4485 - protein, 5 aa, ARTIFICIAL SEQUENCE
  Synthetic Construct
KIAAK

SEQ ID NO: 4486 - protein, 5 aa, ARTIFICIAL SEQUENCE
  Synthetic Construct
KIADK

SEQ ID NO: 4487 - protein, 5 aa, ARTIFICIAL SEQUENCE
  Synthetic Construct
KIAEK

SEQ ID NO: 4488 - protein, 5 aa, ARTIFICIAL SEQUENCE
  Synthetic Construct
KIAFK

SEQ ID NO: 4489 - protein, 5 aa, ARTIFICIAL SEQUENCE
  Synthetic Construct
KIAGK

SEQ ID NO: 4490 - protein, 5 aa, ARTIFICIAL SEQUENCE
  Synthetic Construct
KIAHK

SEQ ID NO: 4491 - protein, 5 aa, ARTIFICIAL SEQUENCE
  Synthetic Construct
KIAIK

SEQ ID NO: 4492 - protein, 5 aa, ARTIFICIAL SEQUENCE
  Synthetic Construct
KIALK

SEQ ID NO: 4493 - protein, 5 aa, ARTIFICIAL SEQUENCE
  Synthetic Construct
KIANK

SEQ ID NO: 4494 - protein, 5 aa, ARTIFICIAL SEQUENCE
  Synthetic Construct
KIAQK

SEQ ID NO: 4495 - protein, 5 aa, ARTIFICIAL SEQUENCE
  Synthetic Construct
KIARK

SEQ ID NO: 4496 - protein, 5 aa, ARTIFICIAL SEQUENCE
  Synthetic Construct
KIASK

SEQ ID NO: 4497 - protein, 5 aa, ARTIFICIAL SEQUENCE
  Synthetic Construct
KIATK

SEQ ID NO: 4498 - protein, 5 aa, ARTIFICIAL SEQUENCE
  Synthetic Construct
KIAYK

SEQ ID NO: 4499 - protein, 5 aa, ARTIFICIAL SEQUENCE
  Synthetic Construct
KIDAK

SEQ ID NO: 4500 - protein, 5 aa, ARTIFICIAL SEQUENCE
  Synthetic Construct
KIDDK

SEQ ID NO: 4501 - protein, 5 aa, ARTIFICIAL SEQUENCE
  Synthetic Construct
KIDEK

SEQ ID NO: 4502 - protein, 5 aa, ARTIFICIAL SEQUENCE
  Synthetic Construct
KIDFK

SEQ ID NO: 4503 - protein, 5 aa, ARTIFICIAL SEQUENCE
  Synthetic Construct
KIDGK

SEQ ID NO: 4504 - protein, 5 aa, ARTIFICIAL SEQUENCE
  Synthetic Construct
KIDHK

SEQ ID NO: 4505 - protein, 5 aa, ARTIFICIAL SEQUENCE
  Synthetic Construct
KIDIK

SEQ ID NO: 4506 - protein, 5 aa, ARTIFICIAL SEQUENCE
  Synthetic Construct
KIDLK

SEQ ID NO: 4507 - protein, 5 aa, ARTIFICIAL SEQUENCE
  Synthetic Construct
KIDNK

SEQ ID NO: 4508 - protein, 5 aa, ARTIFICIAL SEQUENCE
  Synthetic Construct
KIDQK

SEQ ID NO: 4509 - protein, 5 aa, ARTIFICIAL SEQUENCE
  Synthetic Construct
KIDRK

SEQ ID NO: 4510 - protein, 5 aa, ARTIFICIAL SEQUENCE
  Synthetic Construct
KIDSK

SEQ ID NO: 4511 - protein, 5 aa, ARTIFICIAL SEQUENCE
  Synthetic Construct
KIDTK

SEQ ID NO: 4512 - protein, 5 aa, ARTIFICIAL SEQUENCE
  Synthetic Construct
KIDYK

SEQ ID NO: 4513 - protein, 5 aa, ARTIFICIAL SEQUENCE
  Synthetic Construct
KIEAK

SEQ ID NO: 4514 - protein, 5 aa, ARTIFICIAL SEQUENCE
  Synthetic Construct
KIEDK

SEQ ID NO: 4515 - protein, 5 aa, ARTIFICIAL SEQUENCE
  Synthetic Construct
KIEEK

SEQ ID NO: 4516 - protein, 5 aa, ARTIFICIAL SEQUENCE
  Synthetic Construct
KIEFK

SEQ ID NO: 4517 - protein, 5 aa, ARTIFICIAL SEQUENCE
  Synthetic Construct
KIEGK

SEQ ID NO: 4518 - protein, 5 aa, ARTIFICIAL SEQUENCE
  Synthetic Construct
KIEHK

SEQ ID NO: 4519 - protein, 5 aa, ARTIFICIAL SEQUENCE
  Synthetic Construct
KIEIK

SEQ ID NO: 4520 - protein, 5 aa, ARTIFICIAL SEQUENCE
  Synthetic Construct
KIELK

SEQ ID NO: 4521 - protein, 5 aa, ARTIFICIAL SEQUENCE
  Synthetic Construct
KIENK

SEQ ID NO: 4522 - protein, 5 aa, ARTIFICIAL SEQUENCE
  Synthetic Construct
KIEQK

SEQ ID NO: 4523 - protein, 5 aa, ARTIFICIAL SEQUENCE
  Synthetic Construct
KIERK

SEQ ID NO: 4524 - protein, 5 aa, ARTIFICIAL SEQUENCE
  Synthetic Construct
KIESK

SEQ ID NO: 4525 - protein, 5 aa, ARTIFICIAL SEQUENCE
  Synthetic Construct
KIETK

SEQ ID NO: 4526 - protein, 5 aa, ARTIFICIAL SEQUENCE
  Synthetic Construct
KIEYK

SEQ ID NO: 4527 - protein, 5 aa, ARTIFICIAL SEQUENCE
  Synthetic Construct
KIFAK

SEQ ID NO: 4528 - protein, 5 aa, ARTIFICIAL SEQUENCE
  Synthetic Construct
KIFDK

SEQ ID NO: 4529 - protein, 5 aa, ARTIFICIAL SEQUENCE
  Synthetic Construct
KIFEK

SEQ ID NO: 4530 - protein, 5 aa, ARTIFICIAL SEQUENCE
  Synthetic Construct
KIFFK

SEQ ID NO: 4531 - protein, 5 aa, ARTIFICIAL SEQUENCE
  Synthetic Construct
KIFGK

SEQ ID NO: 4532 - protein, 5 aa, ARTIFICIAL SEQUENCE
  Synthetic Construct
KIFHK

SEQ ID NO: 4533 - protein, 5 aa, ARTIFICIAL SEQUENCE
  Synthetic Construct
KIFIK

SEQ ID NO: 4534 - protein, 5 aa, ARTIFICIAL SEQUENCE
  Synthetic Construct
KIFLK

SEQ ID NO: 4535 - protein, 5 aa, ARTIFICIAL SEQUENCE
  Synthetic Construct
KIFNK

SEQ ID NO: 4536 - protein, 5 aa, ARTIFICIAL SEQUENCE
  Synthetic Construct
KIFQK

SEQ ID NO: 4537 - protein, 5 aa, ARTIFICIAL SEQUENCE
  Synthetic Construct
KIFRK

SEQ ID NO: 4538 - protein, 5 aa, ARTIFICIAL SEQUENCE
  Synthetic Construct
KIFSK

SEQ ID NO: 4539 - protein, 5 aa, ARTIFICIAL SEQUENCE
  Synthetic Construct
KIFTK

SEQ ID NO: 4540 - protein, 5 aa, ARTIFICIAL SEQUENCE
  Synthetic Construct
KIFYK

SEQ ID NO: 4541 - protein, 5 aa, ARTIFICIAL SEQUENCE
  Synthetic Construct
KIGAK

SEQ ID NO: 4542 - protein, 5 aa, ARTIFICIAL SEQUENCE
  Synthetic Construct
KIGDK

SEQ ID NO: 4543 - protein, 5 aa, ARTIFICIAL SEQUENCE
  Synthetic Construct
KIGEK

SEQ ID NO: 4544 - protein, 5 aa, ARTIFICIAL SEQUENCE
  Synthetic Construct
KIGFK

SEQ ID NO: 4545 - protein, 5 aa, ARTIFICIAL SEQUENCE
  Synthetic Construct
KIGGK

SEQ ID NO: 4546 - protein, 5 aa, ARTIFICIAL SEQUENCE
  Synthetic Construct
KIGHK

SEQ ID NO: 4547 - protein, 5 aa, ARTIFICIAL SEQUENCE
  Synthetic Construct
KIGIK

SEQ ID NO: 4548 - protein, 5 aa, ARTIFICIAL SEQUENCE
  Synthetic Construct
KIGLK

SEQ ID NO: 4549 - protein, 5 aa, ARTIFICIAL SEQUENCE
  Synthetic Construct
KIGNK

SEQ ID NO: 4550 - protein, 5 aa, ARTIFICIAL SEQUENCE
  Synthetic Construct
KIGQK

SEQ ID NO: 4551 - protein, 5 aa, ARTIFICIAL SEQUENCE
  Synthetic Construct
KIGRK

SEQ ID NO: 4552 - protein, 5 aa, ARTIFICIAL SEQUENCE
  Synthetic Construct
KIGSK

SEQ ID NO: 4553 - protein, 5 aa, ARTIFICIAL SEQUENCE
  Synthetic Construct
KIGTK

SEQ ID NO: 4554 - protein, 5 aa, ARTIFICIAL SEQUENCE
  Synthetic Construct
KIGYK

SEQ ID NO: 4555 - protein, 5 aa, ARTIFICIAL SEQUENCE
  Synthetic Construct
KIHAK

SEQ ID NO: 4556 - protein, 5 aa, ARTIFICIAL SEQUENCE
  Synthetic Construct
KIHDK

SEQ ID NO: 4557 - protein, 5 aa, ARTIFICIAL SEQUENCE
  Synthetic Construct
KIHEK

SEQ ID NO: 4558 - protein, 5 aa, ARTIFICIAL SEQUENCE
  Synthetic Construct
KIHFK

SEQ ID NO: 4559 - protein, 5 aa, ARTIFICIAL SEQUENCE
  Synthetic Construct
KIHGK

SEQ ID NO: 4560 - protein, 5 aa, ARTIFICIAL SEQUENCE
  Synthetic Construct
KIHHK

SEQ ID NO: 4561 - protein, 5 aa, ARTIFICIAL SEQUENCE
  Synthetic Construct
KIHIK

SEQ ID NO: 4562 - protein, 5 aa, ARTIFICIAL SEQUENCE
  Synthetic Construct
KIHLK

SEQ ID NO: 4563 - protein, 5 aa, ARTIFICIAL SEQUENCE
  Synthetic Construct
KIHNK

SEQ ID NO: 4564 - protein, 5 aa, ARTIFICIAL SEQUENCE
  Synthetic Construct
KIHQK

SEQ ID NO: 4565 - protein, 5 aa, ARTIFICIAL SEQUENCE
  Synthetic Construct
KIHRK

SEQ ID NO: 4566 - protein, 5 aa, ARTIFICIAL SEQUENCE
  Synthetic Construct
KIHSK

SEQ ID NO: 4567 - protein, 5 aa, ARTIFICIAL SEQUENCE
  Synthetic Construct
KIHTK

SEQ ID NO: 4568 - protein, 5 aa, ARTIFICIAL SEQUENCE
  Synthetic Construct
KIHYK

SEQ ID NO: 4569 - protein, 5 aa, ARTIFICIAL SEQUENCE
  Synthetic Construct
KIIAK

SEQ ID NO: 4570 - protein, 5 aa, ARTIFICIAL SEQUENCE
  Synthetic Construct
KIIDK

SEQ ID NO: 4571 - protein, 5 aa, ARTIFICIAL SEQUENCE
  Synthetic Construct
KIIEK

SEQ ID NO: 4572 - protein, 5 aa, ARTIFICIAL SEQUENCE
  Synthetic Construct
KIIFK

SEQ ID NO: 4573 - protein, 5 aa, ARTIFICIAL SEQUENCE
  Synthetic Construct
KIIGK

SEQ ID NO: 4574 - protein, 5 aa, ARTIFICIAL SEQUENCE
  Synthetic Construct
KIIHK

SEQ ID NO: 4575 - protein, 5 aa, ARTIFICIAL SEQUENCE
  Synthetic Construct
KIIIK

SEQ ID NO: 4576 - protein, 5 aa, ARTIFICIAL SEQUENCE
  Synthetic Construct
KIILK

SEQ ID NO: 4577 - protein, 5 aa, ARTIFICIAL SEQUENCE
  Synthetic Construct
KIINK

SEQ ID NO: 4578 - protein, 5 aa, ARTIFICIAL SEQUENCE
  Synthetic Construct
KIIQK

SEQ ID NO: 4579 - protein, 5 aa, ARTIFICIAL SEQUENCE
  Synthetic Construct
KIIRK

SEQ ID NO: 4580 - protein, 5 aa, ARTIFICIAL SEQUENCE
  Synthetic Construct
KIISK

SEQ ID NO: 4581 - protein, 5 aa, ARTIFICIAL SEQUENCE
  Synthetic Construct
KIITK

SEQ ID NO: 4582 - protein, 5 aa, ARTIFICIAL SEQUENCE
  Synthetic Construct
KIIYK

SEQ ID NO: 4583 - protein, 5 aa, ARTIFICIAL SEQUENCE
  Synthetic Construct
KILAK

SEQ ID NO: 4584 - protein, 5 aa, ARTIFICIAL SEQUENCE
  Synthetic Construct
KILDK

SEQ ID NO: 4585 - protein, 5 aa, ARTIFICIAL SEQUENCE
  Synthetic Construct
KILEK

SEQ ID NO: 4586 - protein, 5 aa, ARTIFICIAL SEQUENCE
  Synthetic Construct
KILFK

SEQ ID NO: 4587 - protein, 5 aa, ARTIFICIAL SEQUENCE
  Synthetic Construct
KILGK

SEQ ID NO: 4588 - protein, 5 aa, ARTIFICIAL SEQUENCE
  Synthetic Construct
KILHK

SEQ ID NO: 4589 - protein, 5 aa, ARTIFICIAL SEQUENCE
  Synthetic Construct
KILIK

SEQ ID NO: 4590 - protein, 5 aa, ARTIFICIAL SEQUENCE
  Synthetic Construct
KILLK

SEQ ID NO: 4591 - protein, 5 aa, ARTIFICIAL SEQUENCE
  Synthetic Construct
KILNK

SEQ ID NO: 4592 - protein, 5 aa, ARTIFICIAL SEQUENCE
  Synthetic Construct
KILQK

SEQ ID NO: 4593 - protein, 5 aa, ARTIFICIAL SEQUENCE
  Synthetic Construct
KILRK

SEQ ID NO: 4594 - protein, 5 aa, ARTIFICIAL SEQUENCE
  Synthetic Construct
KILSK

SEQ ID NO: 4595 - protein, 5 aa, ARTIFICIAL SEQUENCE
  Synthetic Construct
KILTK

SEQ ID NO: 4596 - protein, 5 aa, ARTIFICIAL SEQUENCE
  Synthetic Construct
KILYK

SEQ ID NO: 4597 - protein, 5 aa, ARTIFICIAL SEQUENCE
  Synthetic Construct
KINAK

SEQ ID NO: 4598 - protein, 5 aa, ARTIFICIAL SEQUENCE
  Synthetic Construct
KINDK

SEQ ID NO: 4599 - protein, 5 aa, ARTIFICIAL SEQUENCE
  Synthetic Construct
KINEK

SEQ ID NO: 4600 - protein, 5 aa, ARTIFICIAL SEQUENCE
  Synthetic Construct
KINFK

SEQ ID NO: 4601 - protein, 5 aa, ARTIFICIAL SEQUENCE
  Synthetic Construct
KINGK

SEQ ID NO: 4602 - protein, 5 aa, ARTIFICIAL SEQUENCE
  Synthetic Construct
KINHK

SEQ ID NO: 4603 - protein, 5 aa, ARTIFICIAL SEQUENCE
  Synthetic Construct
KINIK

SEQ ID NO: 4604 - protein, 5 aa, ARTIFICIAL SEQUENCE
  Synthetic Construct
KINLK

SEQ ID NO: 4605 - protein, 5 aa, ARTIFICIAL SEQUENCE
  Synthetic Construct
KINNK

SEQ ID NO: 4606 - protein, 5 aa, ARTIFICIAL SEQUENCE
  Synthetic Construct
KINQK

SEQ ID NO: 4607 - protein, 5 aa, ARTIFICIAL SEQUENCE
  Synthetic Construct
KINRK

SEQ ID NO: 4608 - protein, 5 aa, ARTIFICIAL SEQUENCE
  Synthetic Construct
KINSK

SEQ ID NO: 4609 - protein, 5 aa, ARTIFICIAL SEQUENCE
  Synthetic Construct
KINTK

SEQ ID NO: 4610 - protein, 5 aa, ARTIFICIAL SEQUENCE
  Synthetic Construct
KINYK

SEQ ID NO: 4611 - protein, 5 aa, ARTIFICIAL SEQUENCE
  Synthetic Construct
KIPAK

SEQ ID NO: 4612 - protein, 5 aa, ARTIFICIAL SEQUENCE
  Synthetic Construct
KIPDK

SEQ ID NO: 4613 - protein, 5 aa, ARTIFICIAL SEQUENCE
  Synthetic Construct
KIPEK

SEQ ID NO: 4614 - protein, 5 aa, ARTIFICIAL SEQUENCE
  Synthetic Construct
KIPFK

SEQ ID NO: 4615 - protein, 5 aa, ARTIFICIAL SEQUENCE
  Synthetic Construct
KIPGK

SEQ ID NO: 4616 - protein, 5 aa, ARTIFICIAL SEQUENCE
  Synthetic Construct
KIPHK

SEQ ID NO: 4617 - protein, 5 aa, ARTIFICIAL SEQUENCE
  Synthetic Construct
KIPIK

SEQ ID NO: 4618 - protein, 5 aa, ARTIFICIAL SEQUENCE
  Synthetic Construct
KIPLK

SEQ ID NO: 4619 - protein, 5 aa, ARTIFICIAL SEQUENCE
  Synthetic Construct
KIPNK

SEQ ID NO: 4620 - protein, 5 aa, ARTIFICIAL SEQUENCE
  Synthetic Construct
KIPQK

SEQ ID NO: 4621 - protein, 5 aa, ARTIFICIAL SEQUENCE
  Synthetic Construct
KIPRK

SEQ ID NO: 4622 - protein, 5 aa, ARTIFICIAL SEQUENCE
  Synthetic Construct
KIPSK

SEQ ID NO: 4623 - protein, 5 aa, ARTIFICIAL SEQUENCE
  Synthetic Construct
KIPTK

SEQ ID NO: 4624 - protein, 5 aa, ARTIFICIAL SEQUENCE
  Synthetic Construct
KIPYK

SEQ ID NO: 4625 - protein, 5 aa, ARTIFICIAL SEQUENCE
  Synthetic Construct
KIQAK

SEQ ID NO: 4626 - protein, 5 aa, ARTIFICIAL SEQUENCE
  Synthetic Construct
KIQDK

SEQ ID NO: 4627 - protein, 5 aa, ARTIFICIAL SEQUENCE
  Synthetic Construct
KIQEK

SEQ ID NO: 4628 - protein, 5 aa, ARTIFICIAL SEQUENCE
  Synthetic Construct
KIQFK

SEQ ID NO: 4629 - protein, 5 aa, ARTIFICIAL SEQUENCE
  Synthetic Construct
KIQGK

SEQ ID NO: 4630 - protein, 5 aa, ARTIFICIAL SEQUENCE
  Synthetic Construct
KIQHK

SEQ ID NO: 4631 - protein, 5 aa, ARTIFICIAL SEQUENCE
  Synthetic Construct
KIQIK

SEQ ID NO: 4632 - protein, 5 aa, ARTIFICIAL SEQUENCE
  Synthetic Construct
KIQLK

SEQ ID NO: 4633 - protein, 5 aa, ARTIFICIAL SEQUENCE
  Synthetic Construct
KIQNK

SEQ ID NO: 4634 - protein, 5 aa, ARTIFICIAL SEQUENCE
  Synthetic Construct
KIQQK

SEQ ID NO: 4635 - protein, 5 aa, ARTIFICIAL SEQUENCE
  Synthetic Construct
KIQRK

SEQ ID NO: 4636 - protein, 5 aa, ARTIFICIAL SEQUENCE
  Synthetic Construct
KIQSK

SEQ ID NO: 4637 - protein, 5 aa, ARTIFICIAL SEQUENCE
  Synthetic Construct
KIQTK

SEQ ID NO: 4638 - protein, 5 aa, ARTIFICIAL SEQUENCE
  Synthetic Construct
KIQYK

SEQ ID NO: 4639 - protein, 5 aa, ARTIFICIAL SEQUENCE
  Synthetic Construct
KIRAK

SEQ ID NO: 4640 - protein, 5 aa, ARTIFICIAL SEQUENCE
  Synthetic Construct
KIRDK

SEQ ID NO: 4641 - protein, 5 aa, ARTIFICIAL SEQUENCE
  Synthetic Construct
KIREK

SEQ ID NO: 4642 - protein, 5 aa, ARTIFICIAL SEQUENCE
  Synthetic Construct
KIRFK

SEQ ID NO: 4643 - protein, 5 aa, ARTIFICIAL SEQUENCE
  Synthetic Construct
KIRGK

SEQ ID NO: 4644 - protein, 5 aa, ARTIFICIAL SEQUENCE
  Synthetic Construct
KIRHK

SEQ ID NO: 4645 - protein, 5 aa, ARTIFICIAL SEQUENCE
  Synthetic Construct
KIRIK

SEQ ID NO: 4646 - protein, 5 aa, ARTIFICIAL SEQUENCE
  Synthetic Construct
KIRLK

SEQ ID NO: 4647 - protein, 5 aa, ARTIFICIAL SEQUENCE
  Synthetic Construct
KIRNK

SEQ ID NO: 4648 - protein, 5 aa, ARTIFICIAL SEQUENCE
  Synthetic Construct
KIRQK

SEQ ID NO: 4649 - protein, 5 aa, ARTIFICIAL SEQUENCE
  Synthetic Construct
KIRRK

SEQ ID NO: 4650 - protein, 5 aa, ARTIFICIAL SEQUENCE
  Synthetic Construct
KIRSK

SEQ ID NO: 4651 - protein, 5 aa, ARTIFICIAL SEQUENCE
  Synthetic Construct
KIRTK

SEQ ID NO: 4652 - protein, 5 aa, ARTIFICIAL SEQUENCE
  Synthetic Construct
KIRYK

SEQ ID NO: 4653 - protein, 5 aa, ARTIFICIAL SEQUENCE
  Synthetic Construct
KISAK

SEQ ID NO: 4654 - protein, 5 aa, ARTIFICIAL SEQUENCE
  Synthetic Construct
KISDK

SEQ ID NO: 4655 - protein, 5 aa, ARTIFICIAL SEQUENCE
  Synthetic Construct
KISEK

SEQ ID NO: 4656 - protein, 5 aa, ARTIFICIAL SEQUENCE
  Synthetic Construct
KISFK

SEQ ID NO: 4657 - protein, 5 aa, ARTIFICIAL SEQUENCE
  Synthetic Construct
KISGK

SEQ ID NO: 4658 - protein, 5 aa, ARTIFICIAL SEQUENCE
  Synthetic Construct
KISHK

SEQ ID NO: 4659 - protein, 5 aa, ARTIFICIAL SEQUENCE
  Synthetic Construct
KISIK

SEQ ID NO: 4660 - protein, 5 aa, ARTIFICIAL SEQUENCE
  Synthetic Construct
KISLK

SEQ ID NO: 4661 - protein, 5 aa, ARTIFICIAL SEQUENCE
  Synthetic Construct
KISNK

SEQ ID NO: 4662 - protein, 5 aa, ARTIFICIAL SEQUENCE
  Synthetic Construct
KISQK

SEQ ID NO: 4663 - protein, 5 aa, ARTIFICIAL SEQUENCE
  Synthetic Construct
KISRK

SEQ ID NO: 4664 - protein, 5 aa, ARTIFICIAL SEQUENCE
  Synthetic Construct
KISSK

SEQ ID NO: 4665 - protein, 5 aa, ARTIFICIAL SEQUENCE
  Synthetic Construct
KISTK

SEQ ID NO: 4666 - protein, 5 aa, ARTIFICIAL SEQUENCE
  Synthetic Construct
KISYK

SEQ ID NO: 4667 - protein, 5 aa, ARTIFICIAL SEQUENCE
  Synthetic Construct
KITAK

SEQ ID NO: 4668 - protein, 5 aa, ARTIFICIAL SEQUENCE
  Synthetic Construct
KITDK

SEQ ID NO: 4669 - protein, 5 aa, ARTIFICIAL SEQUENCE
  Synthetic Construct
KITEK

SEQ ID NO: 4670 - protein, 5 aa, ARTIFICIAL SEQUENCE
  Synthetic Construct
KITFK

SEQ ID NO: 4671 - protein, 5 aa, ARTIFICIAL SEQUENCE
  Synthetic Construct
KITGK

SEQ ID NO: 4672 - protein, 5 aa, ARTIFICIAL SEQUENCE
  Synthetic Construct
KITHK

SEQ ID NO: 4673 - protein, 5 aa, ARTIFICIAL SEQUENCE
  Synthetic Construct
KITIK

SEQ ID NO: 4674 - protein, 5 aa, ARTIFICIAL SEQUENCE
  Synthetic Construct
KITLK

SEQ ID NO: 4675 - protein, 5 aa, ARTIFICIAL SEQUENCE
  Synthetic Construct
KITNK

SEQ ID NO: 4676 - protein, 5 aa, ARTIFICIAL SEQUENCE
  Synthetic Construct
KITQK

SEQ ID NO: 4677 - protein, 5 aa, ARTIFICIAL SEQUENCE
  Synthetic Construct
KITRK

SEQ ID NO: 4678 - protein, 5 aa, ARTIFICIAL SEQUENCE
  Synthetic Construct
KITSK

SEQ ID NO: 4679 - protein, 5 aa, ARTIFICIAL SEQUENCE
  Synthetic Construct
KITTK

SEQ ID NO: 4680 - protein, 5 aa, ARTIFICIAL SEQUENCE
  Synthetic Construct
KITYK

SEQ ID NO: 4681 - protein, 5 aa, ARTIFICIAL SEQUENCE
  Synthetic Construct
KIYAK

SEQ ID NO: 4682 - protein, 5 aa, ARTIFICIAL SEQUENCE
  Synthetic Construct
KIYDK

SEQ ID NO: 4683 - protein, 5 aa, ARTIFICIAL SEQUENCE
  Synthetic Construct
KIYEK

SEQ ID NO: 4684 - protein, 5 aa, ARTIFICIAL SEQUENCE
  Synthetic Construct
KIYFK

SEQ ID NO: 4685 - protein, 5 aa, ARTIFICIAL SEQUENCE
  Synthetic Construct
KIYGK

SEQ ID NO: 4686 - protein, 5 aa, ARTIFICIAL SEQUENCE
  Synthetic Construct
KIYHK

SEQ ID NO: 4687 - protein, 5 aa, ARTIFICIAL SEQUENCE
  Synthetic Construct
KIYIK

SEQ ID NO: 4688 - protein, 5 aa, ARTIFICIAL SEQUENCE
  Synthetic Construct
KIYLK

SEQ ID NO: 4689 - protein, 5 aa, ARTIFICIAL SEQUENCE
  Synthetic Construct
KIYNK

SEQ ID NO: 4690 - protein, 5 aa, ARTIFICIAL SEQUENCE
  Synthetic Construct
KIYQK

SEQ ID NO: 4691 - protein, 5 aa, ARTIFICIAL SEQUENCE
  Synthetic Construct
KIYRK

SEQ ID NO: 4692 - protein, 5 aa, ARTIFICIAL SEQUENCE
  Synthetic Construct
KIYSK

SEQ ID NO: 4693 - protein, 5 aa, ARTIFICIAL SEQUENCE
  Synthetic Construct
KIYTK

SEQ ID NO: 4694 - protein, 5 aa, ARTIFICIAL SEQUENCE
  Synthetic Construct
KIYYK

SEQ ID NO: 4695 - protein, 5 aa, ARTIFICIAL SEQUENCE
  Synthetic Construct
KLAAK

SEQ ID NO: 4696 - protein, 5 aa, ARTIFICIAL SEQUENCE
  Synthetic Construct
KLADK

SEQ ID NO: 4697 - protein, 5 aa, ARTIFICIAL SEQUENCE
  Synthetic Construct
KLAEK

SEQ ID NO: 4698 - protein, 5 aa, ARTIFICIAL SEQUENCE
  Synthetic Construct
KLAFK

SEQ ID NO: 4699 - protein, 5 aa, ARTIFICIAL SEQUENCE
  Synthetic Construct
KLAGK

SEQ ID NO: 4700 - protein, 5 aa, ARTIFICIAL SEQUENCE
  Synthetic Construct
KLAHK

SEQ ID NO: 4701 - protein, 5 aa, ARTIFICIAL SEQUENCE
  Synthetic Construct
KLAIK

SEQ ID NO: 4702 - protein, 5 aa, ARTIFICIAL SEQUENCE
  Synthetic Construct
KLALK

SEQ ID NO: 4703 - protein, 5 aa, ARTIFICIAL SEQUENCE
  Synthetic Construct
KLANK

SEQ ID NO: 4704 - protein, 5 aa, ARTIFICIAL SEQUENCE
  Synthetic Construct
KLAQK

SEQ ID NO: 4705 - protein, 5 aa, ARTIFICIAL SEQUENCE
  Synthetic Construct
KLARK

SEQ ID NO: 4706 - protein, 5 aa, ARTIFICIAL SEQUENCE
  Synthetic Construct
KLASK

SEQ ID NO: 4707 - protein, 5 aa, ARTIFICIAL SEQUENCE
  Synthetic Construct
KLATK

SEQ ID NO: 4708 - protein, 5 aa, ARTIFICIAL SEQUENCE
  Synthetic Construct
KLAYK

SEQ ID NO: 4709 - protein, 5 aa, ARTIFICIAL SEQUENCE
  Synthetic Construct
KLDAK

SEQ ID NO: 4710 - protein, 5 aa, ARTIFICIAL SEQUENCE
  Synthetic Construct
KLDDK

SEQ ID NO: 4711 - protein, 5 aa, ARTIFICIAL SEQUENCE
  Synthetic Construct
KLDEK

SEQ ID NO: 4712 - protein, 5 aa, ARTIFICIAL SEQUENCE
  Synthetic Construct
KLDFK

SEQ ID NO: 4713 - protein, 5 aa, ARTIFICIAL SEQUENCE
  Synthetic Construct
KLDGK

SEQ ID NO: 4714 - protein, 5 aa, ARTIFICIAL SEQUENCE
  Synthetic Construct
KLDHK

SEQ ID NO: 4715 - protein, 5 aa, ARTIFICIAL SEQUENCE
  Synthetic Construct
KLDIK

SEQ ID NO: 4716 - protein, 5 aa, ARTIFICIAL SEQUENCE
  Synthetic Construct
KLDLK

SEQ ID NO: 4717 - protein, 5 aa, ARTIFICIAL SEQUENCE
  Synthetic Construct
KLDNK

SEQ ID NO: 4718 - protein, 5 aa, ARTIFICIAL SEQUENCE
  Synthetic Construct
KLDQK

SEQ ID NO: 4719 - protein, 5 aa, ARTIFICIAL SEQUENCE
  Synthetic Construct
KLDRK

SEQ ID NO: 4720 - protein, 5 aa, ARTIFICIAL SEQUENCE
  Synthetic Construct
KLDSK

SEQ ID NO: 4721 - protein, 5 aa, ARTIFICIAL SEQUENCE
  Synthetic Construct
KLDTK

SEQ ID NO: 4722 - protein, 5 aa, ARTIFICIAL SEQUENCE
  Synthetic Construct
KLDYK

SEQ ID NO: 4723 - protein, 5 aa, ARTIFICIAL SEQUENCE
  Synthetic Construct
KLEAK

SEQ ID NO: 4724 - protein, 5 aa, ARTIFICIAL SEQUENCE
  Synthetic Construct
KLEDK

SEQ ID NO: 4725 - protein, 5 aa, ARTIFICIAL SEQUENCE
  Synthetic Construct
KLEEK

SEQ ID NO: 4726 - protein, 5 aa, ARTIFICIAL SEQUENCE
  Synthetic Construct
KLEFK

SEQ ID NO: 4727 - protein, 5 aa, ARTIFICIAL SEQUENCE
  Synthetic Construct
KLEGK

SEQ ID NO: 4728 - protein, 5 aa, ARTIFICIAL SEQUENCE
  Synthetic Construct
KLEHK

SEQ ID NO: 4729 - protein, 5 aa, ARTIFICIAL SEQUENCE
  Synthetic Construct
KLEIK

SEQ ID NO: 4730 - protein, 5 aa, ARTIFICIAL SEQUENCE
  Synthetic Construct
KLELK

SEQ ID NO: 4731 - protein, 5 aa, ARTIFICIAL SEQUENCE
  Synthetic Construct
KLENK

SEQ ID NO: 4732 - protein, 5 aa, ARTIFICIAL SEQUENCE
  Synthetic Construct
KLEQK

SEQ ID NO: 4733 - protein, 5 aa, ARTIFICIAL SEQUENCE
  Synthetic Construct
KLERK

SEQ ID NO: 4734 - protein, 5 aa, ARTIFICIAL SEQUENCE
  Synthetic Construct
KLESK

SEQ ID NO: 4735 - protein, 5 aa, ARTIFICIAL SEQUENCE
  Synthetic Construct
KLETK

SEQ ID NO: 4736 - protein, 5 aa, ARTIFICIAL SEQUENCE
  Synthetic Construct
KLEYK

SEQ ID NO: 4737 - protein, 5 aa, ARTIFICIAL SEQUENCE
  Synthetic Construct
KLFAK

SEQ ID NO: 4738 - protein, 5 aa, ARTIFICIAL SEQUENCE
  Synthetic Construct
KLFDK

SEQ ID NO: 4739 - protein, 5 aa, ARTIFICIAL SEQUENCE
  Synthetic Construct
KLFEK

SEQ ID NO: 4740 - protein, 5 aa, ARTIFICIAL SEQUENCE
  Synthetic Construct
KLFFK

SEQ ID NO: 4741 - protein, 5 aa, ARTIFICIAL SEQUENCE
  Synthetic Construct
KLFGK

SEQ ID NO: 4742 - protein, 5 aa, ARTIFICIAL SEQUENCE
  Synthetic Construct
KLFHK

SEQ ID NO: 4743 - protein, 5 aa, ARTIFICIAL SEQUENCE
  Synthetic Construct
KLFIK

SEQ ID NO: 4744 - protein, 5 aa, ARTIFICIAL SEQUENCE
  Synthetic Construct
KLFLK

SEQ ID NO: 4745 - protein, 5 aa, ARTIFICIAL SEQUENCE
  Synthetic Construct
KLFNK

SEQ ID NO: 4746 - protein, 5 aa, ARTIFICIAL SEQUENCE
  Synthetic Construct
KLFQK

SEQ ID NO: 4747 - protein, 5 aa, ARTIFICIAL SEQUENCE
  Synthetic Construct
KLFRK

SEQ ID NO: 4748 - protein, 5 aa, ARTIFICIAL SEQUENCE
  Synthetic Construct
KLFSK

SEQ ID NO: 4749 - protein, 5 aa, ARTIFICIAL SEQUENCE
  Synthetic Construct
KLFTK

SEQ ID NO: 4750 - protein, 5 aa, ARTIFICIAL SEQUENCE
  Synthetic Construct
KLFYK

SEQ ID NO: 4751 - protein, 5 aa, ARTIFICIAL SEQUENCE
  Synthetic Construct
KLGAK

SEQ ID NO: 4752 - protein, 5 aa, ARTIFICIAL SEQUENCE
  Synthetic Construct
KLGDK

SEQ ID NO: 4753 - protein, 5 aa, ARTIFICIAL SEQUENCE
  Synthetic Construct
KLGEK

SEQ ID NO: 4754 - protein, 5 aa, ARTIFICIAL SEQUENCE
  Synthetic Construct
KLGFK

SEQ ID NO: 4755 - protein, 5 aa, ARTIFICIAL SEQUENCE
  Synthetic Construct
KLGGK

SEQ ID NO: 4756 - protein, 5 aa, ARTIFICIAL SEQUENCE
  Synthetic Construct
KLGHK

SEQ ID NO: 4757 - protein, 5 aa, ARTIFICIAL SEQUENCE
  Synthetic Construct
KLGIK

SEQ ID NO: 4758 - protein, 5 aa, ARTIFICIAL SEQUENCE
  Synthetic Construct
KLGLK

SEQ ID NO: 4759 - protein, 5 aa, ARTIFICIAL SEQUENCE
  Synthetic Construct
KLGNK

SEQ ID NO: 4760 - protein, 5 aa, ARTIFICIAL SEQUENCE
  Synthetic Construct
KLGQK

SEQ ID NO: 4761 - protein, 5 aa, ARTIFICIAL SEQUENCE
  Synthetic Construct
KLGRK

SEQ ID NO: 4762 - protein, 5 aa, ARTIFICIAL SEQUENCE
  Synthetic Construct
KLGSK

SEQ ID NO: 4763 - protein, 5 aa, ARTIFICIAL SEQUENCE
  Synthetic Construct
KLGTK

SEQ ID NO: 4764 - protein, 5 aa, ARTIFICIAL SEQUENCE
  Synthetic Construct
KLGYK

SEQ ID NO: 4765 - protein, 5 aa, ARTIFICIAL SEQUENCE
  Synthetic Construct
KLHAK

SEQ ID NO: 4766 - protein, 5 aa, ARTIFICIAL SEQUENCE
  Synthetic Construct
KLHDK

SEQ ID NO: 4767 - protein, 5 aa, ARTIFICIAL SEQUENCE
  Synthetic Construct
KLHEK

SEQ ID NO: 4768 - protein, 5 aa, ARTIFICIAL SEQUENCE
  Synthetic Construct
KLHFK

SEQ ID NO: 4769 - protein, 5 aa, ARTIFICIAL SEQUENCE
  Synthetic Construct
KLHGK

SEQ ID NO: 4770 - protein, 5 aa, ARTIFICIAL SEQUENCE
  Synthetic Construct
KLHHK

SEQ ID NO: 4771 - protein, 5 aa, ARTIFICIAL SEQUENCE
  Synthetic Construct
KLHIK

SEQ ID NO: 4772 - protein, 5 aa, ARTIFICIAL SEQUENCE
  Synthetic Construct
KLHLK

SEQ ID NO: 4773 - protein, 5 aa, ARTIFICIAL SEQUENCE
  Synthetic Construct
KLHNK

SEQ ID NO: 4774 - protein, 5 aa, ARTIFICIAL SEQUENCE
  Synthetic Construct
KLHQK

SEQ ID NO: 4775 - protein, 5 aa, ARTIFICIAL SEQUENCE
  Synthetic Construct
KLHRK

SEQ ID NO: 4776 - protein, 5 aa, ARTIFICIAL SEQUENCE
  Synthetic Construct
KLHSK

SEQ ID NO: 4777 - protein, 5 aa, ARTIFICIAL SEQUENCE
  Synthetic Construct
KLHTK

SEQ ID NO: 4778 - protein, 5 aa, ARTIFICIAL SEQUENCE
  Synthetic Construct
KLHYK

SEQ ID NO: 4779 - protein, 5 aa, ARTIFICIAL SEQUENCE
  Synthetic Construct
KLIAK

SEQ ID NO: 4780 - protein, 5 aa, ARTIFICIAL SEQUENCE
  Synthetic Construct
KLIDK

SEQ ID NO: 4781 - protein, 5 aa, ARTIFICIAL SEQUENCE
  Synthetic Construct
KLIEK

SEQ ID NO: 4782 - protein, 5 aa, ARTIFICIAL SEQUENCE
  Synthetic Construct
KLIFK

SEQ ID NO: 4783 - protein, 5 aa, ARTIFICIAL SEQUENCE
  Synthetic Construct
KLIGK

SEQ ID NO: 4784 - protein, 5 aa, ARTIFICIAL SEQUENCE
  Synthetic Construct
KLIHK

SEQ ID NO: 4785 - protein, 5 aa, ARTIFICIAL SEQUENCE
  Synthetic Construct
KLIIK

SEQ ID NO: 4786 - protein, 5 aa, ARTIFICIAL SEQUENCE
  Synthetic Construct
KLILK

SEQ ID NO: 4787 - protein, 5 aa, ARTIFICIAL SEQUENCE
  Synthetic Construct
KLINK

SEQ ID NO: 4788 - protein, 5 aa, ARTIFICIAL SEQUENCE
  Synthetic Construct
KLIQK

SEQ ID NO: 4789 - protein, 5 aa, ARTIFICIAL SEQUENCE
  Synthetic Construct
KLIRK

SEQ ID NO: 4790 - protein, 5 aa, ARTIFICIAL SEQUENCE
  Synthetic Construct
KLISK

SEQ ID NO: 4791 - protein, 5 aa, ARTIFICIAL SEQUENCE
  Synthetic Construct
KLITK

SEQ ID NO: 4792 - protein, 5 aa, ARTIFICIAL SEQUENCE
  Synthetic Construct
KLIYK

SEQ ID NO: 4793 - protein, 5 aa, ARTIFICIAL SEQUENCE
  Synthetic Construct
KLLAK

SEQ ID NO: 4794 - protein, 5 aa, ARTIFICIAL SEQUENCE
  Synthetic Construct
KLLDK

SEQ ID NO: 4795 - protein, 5 aa, ARTIFICIAL SEQUENCE
  Synthetic Construct
KLLEK

SEQ ID NO: 4796 - protein, 5 aa, ARTIFICIAL SEQUENCE
  Synthetic Construct
KLLFK

SEQ ID NO: 4797 - protein, 5 aa, ARTIFICIAL SEQUENCE
  Synthetic Construct
KLLGK

SEQ ID NO: 4798 - protein, 5 aa, ARTIFICIAL SEQUENCE
  Synthetic Construct
KLLHK

SEQ ID NO: 4799 - protein, 5 aa, ARTIFICIAL SEQUENCE
  Synthetic Construct
KLLIK

SEQ ID NO: 4800 - protein, 5 aa, ARTIFICIAL SEQUENCE
  Synthetic Construct
KLLLK

SEQ ID NO: 4801 - protein, 5 aa, ARTIFICIAL SEQUENCE
  Synthetic Construct
KLLNK

SEQ ID NO: 4802 - protein, 5 aa, ARTIFICIAL SEQUENCE
  Synthetic Construct
KLLQK

SEQ ID NO: 4803 - protein, 5 aa, ARTIFICIAL SEQUENCE
  Synthetic Construct
KLLRK

SEQ ID NO: 4804 - protein, 5 aa, ARTIFICIAL SEQUENCE
  Synthetic Construct
KLLSK

SEQ ID NO: 4805 - protein, 5 aa, ARTIFICIAL SEQUENCE
  Synthetic Construct
KLLTK

SEQ ID NO: 4806 - protein, 5 aa, ARTIFICIAL SEQUENCE
  Synthetic Construct
KLLYK

SEQ ID NO: 4807 - protein, 5 aa, ARTIFICIAL SEQUENCE
  Synthetic Construct
KLNAK

SEQ ID NO: 4808 - protein, 5 aa, ARTIFICIAL SEQUENCE
  Synthetic Construct
KLNDK

SEQ ID NO: 4809 - protein, 5 aa, ARTIFICIAL SEQUENCE
  Synthetic Construct
KLNEK

SEQ ID NO: 4810 - protein, 5 aa, ARTIFICIAL SEQUENCE
  Synthetic Construct
KLNFK

SEQ ID NO: 4811 - protein, 5 aa, ARTIFICIAL SEQUENCE
  Synthetic Construct
KLNGK

SEQ ID NO: 4812 - protein, 5 aa, ARTIFICIAL SEQUENCE
  Synthetic Construct
KLNHK

SEQ ID NO: 4813 - protein, 5 aa, ARTIFICIAL SEQUENCE
  Synthetic Construct
KLNIK

SEQ ID NO: 4814 - protein, 5 aa, ARTIFICIAL SEQUENCE
  Synthetic Construct
KLNLK

SEQ ID NO: 4815 - protein, 5 aa, ARTIFICIAL SEQUENCE
  Synthetic Construct
KLNNK

SEQ ID NO: 4816 - protein, 5 aa, ARTIFICIAL SEQUENCE
  Synthetic Construct
KLNQK

SEQ ID NO: 4817 - protein, 5 aa, ARTIFICIAL SEQUENCE
  Synthetic Construct
KLNRK

SEQ ID NO: 4818 - protein, 5 aa, ARTIFICIAL SEQUENCE
  Synthetic Construct
KLNSK

SEQ ID NO: 4819 - protein, 5 aa, ARTIFICIAL SEQUENCE
  Synthetic Construct
KLNTK

SEQ ID NO: 4820 - protein, 5 aa, ARTIFICIAL SEQUENCE
  Synthetic Construct
KLNYK

SEQ ID NO: 4821 - protein, 5 aa, ARTIFICIAL SEQUENCE
  Synthetic Construct
KLPAK

SEQ ID NO: 4822 - protein, 5 aa, ARTIFICIAL SEQUENCE
  Synthetic Construct
KLPDK

SEQ ID NO: 4823 - protein, 5 aa, ARTIFICIAL SEQUENCE
  Synthetic Construct
KLPEK

SEQ ID NO: 4824 - protein, 5 aa, ARTIFICIAL SEQUENCE
  Synthetic Construct
KLPFK

SEQ ID NO: 4825 - protein, 5 aa, ARTIFICIAL SEQUENCE
  Synthetic Construct
KLPGK

SEQ ID NO: 4826 - protein, 5 aa, ARTIFICIAL SEQUENCE
  Synthetic Construct
KLPHK

SEQ ID NO: 4827 - protein, 5 aa, ARTIFICIAL SEQUENCE
  Synthetic Construct
KLPIK

SEQ ID NO: 4828 - protein, 5 aa, ARTIFICIAL SEQUENCE
  Synthetic Construct
KLPLK

SEQ ID NO: 4829 - protein, 5 aa, ARTIFICIAL SEQUENCE
  Synthetic Construct
KLPNK

SEQ ID NO: 4830 - protein, 5 aa, ARTIFICIAL SEQUENCE
  Synthetic Construct
KLPQK

SEQ ID NO: 4831 - protein, 5 aa, ARTIFICIAL SEQUENCE
  Synthetic Construct
KLPRK

SEQ ID NO: 4832 - protein, 5 aa, ARTIFICIAL SEQUENCE
  Synthetic Construct
KLPSK

SEQ ID NO: 4833 - protein, 5 aa, ARTIFICIAL SEQUENCE
  Synthetic Construct
KLPTK

SEQ ID NO: 4834 - protein, 5 aa, ARTIFICIAL SEQUENCE
  Synthetic Construct
KLPYK

SEQ ID NO: 4835 - protein, 5 aa, ARTIFICIAL SEQUENCE
  Synthetic Construct
KLQAK

SEQ ID NO: 4836 - protein, 5 aa, ARTIFICIAL SEQUENCE
  Synthetic Construct
KLQDK

SEQ ID NO: 4837 - protein, 5 aa, ARTIFICIAL SEQUENCE
  Synthetic Construct
KLQEK

SEQ ID NO: 4838 - protein, 5 aa, ARTIFICIAL SEQUENCE
  Synthetic Construct
KLQFK

SEQ ID NO: 4839 - protein, 5 aa, ARTIFICIAL SEQUENCE
  Synthetic Construct
KLQGK

SEQ ID NO: 4840 - protein, 5 aa, ARTIFICIAL SEQUENCE
  Synthetic Construct
KLQHK

SEQ ID NO: 4841 - protein, 5 aa, ARTIFICIAL SEQUENCE
  Synthetic Construct
KLQIK

SEQ ID NO: 4842 - protein, 5 aa, ARTIFICIAL SEQUENCE
  Synthetic Construct
KLQLK

SEQ ID NO: 4843 - protein, 5 aa, ARTIFICIAL SEQUENCE
  Synthetic Construct
KLQNK

SEQ ID NO: 4844 - protein, 5 aa, ARTIFICIAL SEQUENCE
  Synthetic Construct
KLQQK

SEQ ID NO: 4845 - protein, 5 aa, ARTIFICIAL SEQUENCE
  Synthetic Construct
KLQRK

SEQ ID NO: 4846 - protein, 5 aa, ARTIFICIAL SEQUENCE
  Synthetic Construct
KLQSK

SEQ ID NO: 4847 - protein, 5 aa, ARTIFICIAL SEQUENCE
  Synthetic Construct
KLQTK

SEQ ID NO: 4848 - protein, 5 aa, ARTIFICIAL SEQUENCE
  Synthetic Construct
KLQYK

SEQ ID NO: 4849 - protein, 5 aa, ARTIFICIAL SEQUENCE
  Synthetic Construct
KLRAK

SEQ ID NO: 4850 - protein, 5 aa, ARTIFICIAL SEQUENCE
  Synthetic Construct
KLRDK

SEQ ID NO: 4851 - protein, 5 aa, ARTIFICIAL SEQUENCE
  Synthetic Construct
KLREK

SEQ ID NO: 4852 - protein, 5 aa, ARTIFICIAL SEQUENCE
  Synthetic Construct
KLRFK

SEQ ID NO: 4853 - protein, 5 aa, ARTIFICIAL SEQUENCE
  Synthetic Construct
KLRGK

SEQ ID NO: 4854 - protein, 5 aa, ARTIFICIAL SEQUENCE
  Synthetic Construct
KLRHK

SEQ ID NO: 4855 - protein, 5 aa, ARTIFICIAL SEQUENCE
  Synthetic Construct
KLRIK

SEQ ID NO: 4856 - protein, 5 aa, ARTIFICIAL SEQUENCE
  Synthetic Construct
KLRLK

SEQ ID NO: 4857 - protein, 5 aa, ARTIFICIAL SEQUENCE
  Synthetic Construct
KLRNK

SEQ ID NO: 4858 - protein, 5 aa, ARTIFICIAL SEQUENCE
  Synthetic Construct
KLRQK

SEQ ID NO: 4859 - protein, 5 aa, ARTIFICIAL SEQUENCE
  Synthetic Construct
KLRRK

SEQ ID NO: 4860 - protein, 5 aa, ARTIFICIAL SEQUENCE
  Synthetic Construct
KLRSK

SEQ ID NO: 4861 - protein, 5 aa, ARTIFICIAL SEQUENCE
  Synthetic Construct
KLRTK

SEQ ID NO: 4862 - protein, 5 aa, ARTIFICIAL SEQUENCE
  Synthetic Construct
KLRYK

SEQ ID NO: 4863 - protein, 5 aa, ARTIFICIAL SEQUENCE
  Synthetic Construct
KLSAK

SEQ ID NO: 4864 - protein, 5 aa, ARTIFICIAL SEQUENCE
  Synthetic Construct
KLSDK

SEQ ID NO: 4865 - protein, 5 aa, ARTIFICIAL SEQUENCE
  Synthetic Construct
KLSEK

SEQ ID NO: 4866 - protein, 5 aa, ARTIFICIAL SEQUENCE
  Synthetic Construct
KLSFK

SEQ ID NO: 4867 - protein, 5 aa, ARTIFICIAL SEQUENCE
  Synthetic Construct
KLSGK

SEQ ID NO: 4868 - protein, 5 aa, ARTIFICIAL SEQUENCE
  Synthetic Construct
KLSHK

SEQ ID NO: 4869 - protein, 5 aa, ARTIFICIAL SEQUENCE
  Synthetic Construct
KLSIK

SEQ ID NO: 4870 - protein, 5 aa, ARTIFICIAL SEQUENCE
  Synthetic Construct
KLSLK

SEQ ID NO: 4871 - protein, 5 aa, ARTIFICIAL SEQUENCE
  Synthetic Construct
KLSNK

SEQ ID NO: 4872 - protein, 5 aa, ARTIFICIAL SEQUENCE
  Synthetic Construct
KLSQK

SEQ ID NO: 4873 - protein, 5 aa, ARTIFICIAL SEQUENCE
  Synthetic Construct
KLSRK

SEQ ID NO: 4874 - protein, 5 aa, ARTIFICIAL SEQUENCE
  Synthetic Construct
KLSSK

SEQ ID NO: 4875 - protein, 5 aa, ARTIFICIAL SEQUENCE
  Synthetic Construct
KLSTK

SEQ ID NO: 4876 - protein, 5 aa, ARTIFICIAL SEQUENCE
  Synthetic Construct
KLSYK

SEQ ID NO: 4877 - protein, 5 aa, ARTIFICIAL SEQUENCE
  Synthetic Construct
KLTAK

SEQ ID NO: 4878 - protein, 5 aa, ARTIFICIAL SEQUENCE
  Synthetic Construct
KLTDK

SEQ ID NO: 4879 - protein, 5 aa, ARTIFICIAL SEQUENCE
  Synthetic Construct
KLTEK

SEQ ID NO: 4880 - protein, 5 aa, ARTIFICIAL SEQUENCE
  Synthetic Construct
KLTFK

SEQ ID NO: 4881 - protein, 5 aa, ARTIFICIAL SEQUENCE
  Synthetic Construct
KLTGK

SEQ ID NO: 4882 - protein, 5 aa, ARTIFICIAL SEQUENCE
  Synthetic Construct
KLTHK

SEQ ID NO: 4883 - protein, 5 aa, ARTIFICIAL SEQUENCE
  Synthetic Construct
KLTIK

SEQ ID NO: 4884 - protein, 5 aa, ARTIFICIAL SEQUENCE
  Synthetic Construct
KLTLK

SEQ ID NO: 4885 - protein, 5 aa, ARTIFICIAL SEQUENCE
  Synthetic Construct
KLTNK

SEQ ID NO: 4886 - protein, 5 aa, ARTIFICIAL SEQUENCE
  Synthetic Construct
KLTQK

SEQ ID NO: 4887 - protein, 5 aa, ARTIFICIAL SEQUENCE
  Synthetic Construct
KLTRK

SEQ ID NO: 4888 - protein, 5 aa, ARTIFICIAL SEQUENCE
  Synthetic Construct
KLTSK

SEQ ID NO: 4889 - protein, 5 aa, ARTIFICIAL SEQUENCE
  Synthetic Construct
KLTTK

SEQ ID NO: 4890 - protein, 5 aa, ARTIFICIAL SEQUENCE
  Synthetic Construct
KLTYK

SEQ ID NO: 4891 - protein, 5 aa, ARTIFICIAL SEQUENCE
  Synthetic Construct
KLYAK

SEQ ID NO: 4892 - protein, 5 aa, ARTIFICIAL SEQUENCE
  Synthetic Construct
KLYDK

SEQ ID NO: 4893 - protein, 5 aa, ARTIFICIAL SEQUENCE
  Synthetic Construct
KLYEK

SEQ ID NO: 4894 - protein, 5 aa, ARTIFICIAL SEQUENCE
  Synthetic Construct
KLYFK

SEQ ID NO: 4895 - protein, 5 aa, ARTIFICIAL SEQUENCE
  Synthetic Construct
KLYGK

SEQ ID NO: 4896 - protein, 5 aa, ARTIFICIAL SEQUENCE
  Synthetic Construct
KLYHK

SEQ ID NO: 4897 - protein, 5 aa, ARTIFICIAL SEQUENCE
  Synthetic Construct
KLYIK

SEQ ID NO: 4898 - protein, 5 aa, ARTIFICIAL SEQUENCE
  Synthetic Construct
KLYLK

SEQ ID NO: 4899 - protein, 5 aa, ARTIFICIAL SEQUENCE
  Synthetic Construct
KLYNK

SEQ ID NO: 4900 - protein, 5 aa, ARTIFICIAL SEQUENCE
  Synthetic Construct
KLYQK

SEQ ID NO: 4901 - protein, 5 aa, ARTIFICIAL SEQUENCE
  Synthetic Construct
KLYRK

SEQ ID NO: 4902 - protein, 5 aa, ARTIFICIAL SEQUENCE
  Synthetic Construct
KLYSK

SEQ ID NO: 4903 - protein, 5 aa, ARTIFICIAL SEQUENCE
  Synthetic Construct
KLYTK

SEQ ID NO: 4904 - protein, 5 aa, ARTIFICIAL SEQUENCE
  Synthetic Construct
KLYYK

SEQ ID NO: 4905 - protein, 5 aa, ARTIFICIAL SEQUENCE
  Synthetic Construct
KNAAK

SEQ ID NO: 4906 - protein, 5 aa, ARTIFICIAL SEQUENCE
  Synthetic Construct
KNADK

SEQ ID NO: 4907 - protein, 5 aa, ARTIFICIAL SEQUENCE
  Synthetic Construct
KNAEK

SEQ ID NO: 4908 - protein, 5 aa, ARTIFICIAL SEQUENCE
  Synthetic Construct
KNAFK

SEQ ID NO: 4909 - protein, 5 aa, ARTIFICIAL SEQUENCE
  Synthetic Construct
KNAGK

SEQ ID NO: 4910 - protein, 5 aa, ARTIFICIAL SEQUENCE
  Synthetic Construct
KNAHK

SEQ ID NO: 4911 - protein, 5 aa, ARTIFICIAL SEQUENCE
  Synthetic Construct
KNAIK

SEQ ID NO: 4912 - protein, 5 aa, ARTIFICIAL SEQUENCE
  Synthetic Construct
KNALK

SEQ ID NO: 4913 - protein, 5 aa, ARTIFICIAL SEQUENCE
  Synthetic Construct
KNANK

SEQ ID NO: 4914 - protein, 5 aa, ARTIFICIAL SEQUENCE
  Synthetic Construct
KNAQK

SEQ ID NO: 4915 - protein, 5 aa, ARTIFICIAL SEQUENCE
  Synthetic Construct
KNARK

SEQ ID NO: 4916 - protein, 5 aa, ARTIFICIAL SEQUENCE
  Synthetic Construct
KNASK

SEQ ID NO: 4917 - protein, 5 aa, ARTIFICIAL SEQUENCE
  Synthetic Construct
KNATK

SEQ ID NO: 4918 - protein, 5 aa, ARTIFICIAL SEQUENCE
  Synthetic Construct
KNAYK

SEQ ID NO: 4919 - protein, 5 aa, ARTIFICIAL SEQUENCE
  Synthetic Construct
KNDAK

SEQ ID NO: 4920 - protein, 5 aa, ARTIFICIAL SEQUENCE
  Synthetic Construct
KNDDK

SEQ ID NO: 4921 - protein, 5 aa, ARTIFICIAL SEQUENCE
  Synthetic Construct
KNDEK

SEQ ID NO: 4922 - protein, 5 aa, ARTIFICIAL SEQUENCE
  Synthetic Construct
KNDFK

SEQ ID NO: 4923 - protein, 5 aa, ARTIFICIAL SEQUENCE
  Synthetic Construct
KNDGK

SEQ ID NO: 4924 - protein, 5 aa, ARTIFICIAL SEQUENCE
  Synthetic Construct
KNDHK

SEQ ID NO: 4925 - protein, 5 aa, ARTIFICIAL SEQUENCE
  Synthetic Construct
KNDIK

SEQ ID NO: 4926 - protein, 5 aa, ARTIFICIAL SEQUENCE
  Synthetic Construct
KNDLK

SEQ ID NO: 4927 - protein, 5 aa, ARTIFICIAL SEQUENCE
  Synthetic Construct
KNDNK

SEQ ID NO: 4928 - protein, 5 aa, ARTIFICIAL SEQUENCE
  Synthetic Construct
KNDQK

SEQ ID NO: 4929 - protein, 5 aa, ARTIFICIAL SEQUENCE
  Synthetic Construct
KNDRK

SEQ ID NO: 4930 - protein, 5 aa, ARTIFICIAL SEQUENCE
  Synthetic Construct
KNDSK

SEQ ID NO: 4931 - protein, 5 aa, ARTIFICIAL SEQUENCE
  Synthetic Construct
KNDTK

SEQ ID NO: 4932 - protein, 5 aa, ARTIFICIAL SEQUENCE
  Synthetic Construct
KNDYK

SEQ ID NO: 4933 - protein, 5 aa, ARTIFICIAL SEQUENCE
  Synthetic Construct
KNEAK

SEQ ID NO: 4934 - protein, 5 aa, ARTIFICIAL SEQUENCE
  Synthetic Construct
KNEDK

SEQ ID NO: 4935 - protein, 5 aa, ARTIFICIAL SEQUENCE
  Synthetic Construct
KNEEK

SEQ ID NO: 4936 - protein, 5 aa, ARTIFICIAL SEQUENCE
  Synthetic Construct
KNEFK

SEQ ID NO: 4937 - protein, 5 aa, ARTIFICIAL SEQUENCE
  Synthetic Construct
KNEGK

SEQ ID NO: 4938 - protein, 5 aa, ARTIFICIAL SEQUENCE
  Synthetic Construct
KNEHK

SEQ ID NO: 4939 - protein, 5 aa, ARTIFICIAL SEQUENCE
  Synthetic Construct
KNEIK

SEQ ID NO: 4940 - protein, 5 aa, ARTIFICIAL SEQUENCE
  Synthetic Construct
KNELK

SEQ ID NO: 4941 - protein, 5 aa, ARTIFICIAL SEQUENCE
  Synthetic Construct
KNENK

SEQ ID NO: 4942 - protein, 5 aa, ARTIFICIAL SEQUENCE
  Synthetic Construct
KNEQK

SEQ ID NO: 4943 - protein, 5 aa, ARTIFICIAL SEQUENCE
  Synthetic Construct
KNERK

SEQ ID NO: 4944 - protein, 5 aa, ARTIFICIAL SEQUENCE
  Synthetic Construct
KNESK

SEQ ID NO: 4945 - protein, 5 aa, ARTIFICIAL SEQUENCE
  Synthetic Construct
KNETK

SEQ ID NO: 4946 - protein, 5 aa, ARTIFICIAL SEQUENCE
  Synthetic Construct
KNEYK

SEQ ID NO: 4947 - protein, 5 aa, ARTIFICIAL SEQUENCE
  Synthetic Construct
KNFAK

SEQ ID NO: 4948 - protein, 5 aa, ARTIFICIAL SEQUENCE
  Synthetic Construct
KNFDK

SEQ ID NO: 4949 - protein, 5 aa, ARTIFICIAL SEQUENCE
  Synthetic Construct
KNFEK

SEQ ID NO: 4950 - protein, 5 aa, ARTIFICIAL SEQUENCE
  Synthetic Construct
KNFFK

SEQ ID NO: 4951 - protein, 5 aa, ARTIFICIAL SEQUENCE
  Synthetic Construct
KNFGK

SEQ ID NO: 4952 - protein, 5 aa, ARTIFICIAL SEQUENCE
  Synthetic Construct
KNFHK

SEQ ID NO: 4953 - protein, 5 aa, ARTIFICIAL SEQUENCE
  Synthetic Construct
KNFIK

SEQ ID NO: 4954 - protein, 5 aa, ARTIFICIAL SEQUENCE
  Synthetic Construct
KNFLK

SEQ ID NO: 4955 - protein, 5 aa, ARTIFICIAL SEQUENCE
  Synthetic Construct
KNFNK

SEQ ID NO: 4956 - protein, 5 aa, ARTIFICIAL SEQUENCE
  Synthetic Construct
KNFQK

SEQ ID NO: 4957 - protein, 5 aa, ARTIFICIAL SEQUENCE
  Synthetic Construct
KNFRK

SEQ ID NO: 4958 - protein, 5 aa, ARTIFICIAL SEQUENCE
  Synthetic Construct
KNFSK

SEQ ID NO: 4959 - protein, 5 aa, ARTIFICIAL SEQUENCE
  Synthetic Construct
KNFTK

SEQ ID NO: 4960 - protein, 5 aa, ARTIFICIAL SEQUENCE
  Synthetic Construct
KNFYK

SEQ ID NO: 4961 - protein, 5 aa, ARTIFICIAL SEQUENCE
  Synthetic Construct
KNGAK

SEQ ID NO: 4962 - protein, 5 aa, ARTIFICIAL SEQUENCE
  Synthetic Construct
KNGDK

SEQ ID NO: 4963 - protein, 5 aa, ARTIFICIAL SEQUENCE
  Synthetic Construct
KNGEK

SEQ ID NO: 4964 - protein, 5 aa, ARTIFICIAL SEQUENCE
  Synthetic Construct
KNGFK

SEQ ID NO: 4965 - protein, 5 aa, ARTIFICIAL SEQUENCE
  Synthetic Construct
KNGGK

SEQ ID NO: 4966 - protein, 5 aa, ARTIFICIAL SEQUENCE
  Synthetic Construct
KNGHK

SEQ ID NO: 4967 - protein, 5 aa, ARTIFICIAL SEQUENCE
  Synthetic Construct
KNGIK

SEQ ID NO: 4968 - protein, 5 aa, ARTIFICIAL SEQUENCE
  Synthetic Construct
KNGLK

SEQ ID NO: 4969 - protein, 5 aa, ARTIFICIAL SEQUENCE
  Synthetic Construct
KNGNK

SEQ ID NO: 4970 - protein, 5 aa, ARTIFICIAL SEQUENCE
  Synthetic Construct
KNGQK

SEQ ID NO: 4971 - protein, 5 aa, ARTIFICIAL SEQUENCE
  Synthetic Construct
KNGRK

SEQ ID NO: 4972 - protein, 5 aa, ARTIFICIAL SEQUENCE
  Synthetic Construct
KNGSK

SEQ ID NO: 4973 - protein, 5 aa, ARTIFICIAL SEQUENCE
  Synthetic Construct
KNGTK

SEQ ID NO: 4974 - protein, 5 aa, ARTIFICIAL SEQUENCE
  Synthetic Construct
KNGYK

SEQ ID NO: 4975 - protein, 5 aa, ARTIFICIAL SEQUENCE
  Synthetic Construct
KNHAK

SEQ ID NO: 4976 - protein, 5 aa, ARTIFICIAL SEQUENCE
  Synthetic Construct
KNHDK

SEQ ID NO: 4977 - protein, 5 aa, ARTIFICIAL SEQUENCE
  Synthetic Construct
KNHEK

SEQ ID NO: 4978 - protein, 5 aa, ARTIFICIAL SEQUENCE
  Synthetic Construct
KNHFK

SEQ ID NO: 4979 - protein, 5 aa, ARTIFICIAL SEQUENCE
  Synthetic Construct
KNHGK

SEQ ID NO: 4980 - protein, 5 aa, ARTIFICIAL SEQUENCE
  Synthetic Construct
KNHHK

SEQ ID NO: 4981 - protein, 5 aa, ARTIFICIAL SEQUENCE
  Synthetic Construct
KNHIK

SEQ ID NO: 4982 - protein, 5 aa, ARTIFICIAL SEQUENCE
  Synthetic Construct
KNHLK

SEQ ID NO: 4983 - protein, 5 aa, ARTIFICIAL SEQUENCE
  Synthetic Construct
KNHNK

SEQ ID NO: 4984 - protein, 5 aa, ARTIFICIAL SEQUENCE
  Synthetic Construct
KNHQK

SEQ ID NO: 4985 - protein, 5 aa, ARTIFICIAL SEQUENCE
  Synthetic Construct
KNHRK

SEQ ID NO: 4986 - protein, 5 aa, ARTIFICIAL SEQUENCE
  Synthetic Construct
KNHSK

SEQ ID NO: 4987 - protein, 5 aa, ARTIFICIAL SEQUENCE
  Synthetic Construct
KNHTK

SEQ ID NO: 4988 - protein, 5 aa, ARTIFICIAL SEQUENCE
  Synthetic Construct
KNHYK

SEQ ID NO: 4989 - protein, 5 aa, ARTIFICIAL SEQUENCE
  Synthetic Construct
KNIAK

SEQ ID NO: 4990 - protein, 5 aa, ARTIFICIAL SEQUENCE
  Synthetic Construct
KNIDK

SEQ ID NO: 4991 - protein, 5 aa, ARTIFICIAL SEQUENCE
  Synthetic Construct
KNIEK

SEQ ID NO: 4992 - protein, 5 aa, ARTIFICIAL SEQUENCE
  Synthetic Construct
KNIFK

SEQ ID NO: 4993 - protein, 5 aa, ARTIFICIAL SEQUENCE
  Synthetic Construct
KNIGK

SEQ ID NO: 4994 - protein, 5 aa, ARTIFICIAL SEQUENCE
  Synthetic Construct
KNIHK

SEQ ID NO: 4995 - protein, 5 aa, ARTIFICIAL SEQUENCE
  Synthetic Construct
KNIIK

SEQ ID NO: 4996 - protein, 5 aa, ARTIFICIAL SEQUENCE
  Synthetic Construct
KNILK

SEQ ID NO: 4997 - protein, 5 aa, ARTIFICIAL SEQUENCE
  Synthetic Construct
KNINK

SEQ ID NO: 4998 - protein, 5 aa, ARTIFICIAL SEQUENCE
  Synthetic Construct
KNIQK

SEQ ID NO: 4999 - protein, 5 aa, ARTIFICIAL SEQUENCE
  Synthetic Construct
KNIRK

SEQ ID NO: 5000 - protein, 5 aa, ARTIFICIAL SEQUENCE
  Synthetic Construct
KNISK

SEQ ID NO: 5001 - protein, 5 aa, ARTIFICIAL SEQUENCE
  Synthetic Construct
KNITK

SEQ ID NO: 5002 - protein, 5 aa, ARTIFICIAL SEQUENCE
  Synthetic Construct
KNIYK

SEQ ID NO: 5003 - protein, 5 aa, ARTIFICIAL SEQUENCE
  Synthetic Construct
KNLAK

SEQ ID NO: 5004 - protein, 5 aa, ARTIFICIAL SEQUENCE
  Synthetic Construct
KNLDK

SEQ ID NO: 5005 - protein, 5 aa, ARTIFICIAL SEQUENCE
  Synthetic Construct
KNLEK

SEQ ID NO: 5006 - protein, 5 aa, ARTIFICIAL SEQUENCE
  Synthetic Construct
KNLFK

SEQ ID NO: 5007 - protein, 5 aa, ARTIFICIAL SEQUENCE
  Synthetic Construct
KNLGK

SEQ ID NO: 5008 - protein, 5 aa, ARTIFICIAL SEQUENCE
  Synthetic Construct
KNLHK

SEQ ID NO: 5009 - protein, 5 aa, ARTIFICIAL SEQUENCE
  Synthetic Construct
KNLIK

SEQ ID NO: 5010 - protein, 5 aa, ARTIFICIAL SEQUENCE
  Synthetic Construct
KNLLK

SEQ ID NO: 5011 - protein, 5 aa, ARTIFICIAL SEQUENCE
  Synthetic Construct
KNLNK

SEQ ID NO: 5012 - protein, 5 aa, ARTIFICIAL SEQUENCE
  Synthetic Construct
KNLQK

SEQ ID NO: 5013 - protein, 5 aa, ARTIFICIAL SEQUENCE
  Synthetic Construct
KNLRK

SEQ ID NO: 5014 - protein, 5 aa, ARTIFICIAL SEQUENCE
  Synthetic Construct
KNLSK

SEQ ID NO: 5015 - protein, 5 aa, ARTIFICIAL SEQUENCE
  Synthetic Construct
KNLTK

SEQ ID NO: 5016 - protein, 5 aa, ARTIFICIAL SEQUENCE
  Synthetic Construct
KNLYK

SEQ ID NO: 5017 - protein, 5 aa, ARTIFICIAL SEQUENCE
  Synthetic Construct
KNNAK

SEQ ID NO: 5018 - protein, 5 aa, ARTIFICIAL SEQUENCE
  Synthetic Construct
KNNDK

SEQ ID NO: 5019 - protein, 5 aa, ARTIFICIAL SEQUENCE
  Synthetic Construct
KNNEK

SEQ ID NO: 5020 - protein, 5 aa, ARTIFICIAL SEQUENCE
  Synthetic Construct
KNNFK

SEQ ID NO: 5021 - protein, 5 aa, ARTIFICIAL SEQUENCE
  Synthetic Construct
KNNGK

SEQ ID NO: 5022 - protein, 5 aa, ARTIFICIAL SEQUENCE
  Synthetic Construct
KNNHK

SEQ ID NO: 5023 - protein, 5 aa, ARTIFICIAL SEQUENCE
  Synthetic Construct
KNNIK

SEQ ID NO: 5024 - protein, 5 aa, ARTIFICIAL SEQUENCE
  Synthetic Construct
KNNLK

SEQ ID NO: 5025 - protein, 5 aa, ARTIFICIAL SEQUENCE
  Synthetic Construct
KNNNK

SEQ ID NO: 5026 - protein, 5 aa, ARTIFICIAL SEQUENCE
  Synthetic Construct
KNNQK

SEQ ID NO: 5027 - protein, 5 aa, ARTIFICIAL SEQUENCE
  Synthetic Construct
KNNRK

SEQ ID NO: 5028 - protein, 5 aa, ARTIFICIAL SEQUENCE
  Synthetic Construct
KNNSK

SEQ ID NO: 5029 - protein, 5 aa, ARTIFICIAL SEQUENCE
  Synthetic Construct
KNNTK

SEQ ID NO: 5030 - protein, 5 aa, ARTIFICIAL SEQUENCE
  Synthetic Construct
KNNYK

SEQ ID NO: 5031 - protein, 5 aa, ARTIFICIAL SEQUENCE
  Synthetic Construct
KNPAK

SEQ ID NO: 5032 - protein, 5 aa, ARTIFICIAL SEQUENCE
  Synthetic Construct
KNPDK

SEQ ID NO: 5033 - protein, 5 aa, ARTIFICIAL SEQUENCE
  Synthetic Construct
KNPEK

SEQ ID NO: 5034 - protein, 5 aa, ARTIFICIAL SEQUENCE
  Synthetic Construct
KNPFK

SEQ ID NO: 5035 - protein, 5 aa, ARTIFICIAL SEQUENCE
  Synthetic Construct
KNPGK

SEQ ID NO: 5036 - protein, 5 aa, ARTIFICIAL SEQUENCE
  Synthetic Construct
KNPHK

SEQ ID NO: 5037 - protein, 5 aa, ARTIFICIAL SEQUENCE
  Synthetic Construct
KNPIK

SEQ ID NO: 5038 - protein, 5 aa, ARTIFICIAL SEQUENCE
  Synthetic Construct
KNPLK

SEQ ID NO: 5039 - protein, 5 aa, ARTIFICIAL SEQUENCE
  Synthetic Construct
KNPNK

SEQ ID NO: 5040 - protein, 5 aa, ARTIFICIAL SEQUENCE
  Synthetic Construct
KNPQK

SEQ ID NO: 5041 - protein, 5 aa, ARTIFICIAL SEQUENCE
  Synthetic Construct
KNPRK

SEQ ID NO: 5042 - protein, 5 aa, ARTIFICIAL SEQUENCE
  Synthetic Construct
KNPSK

SEQ ID NO: 5043 - protein, 5 aa, ARTIFICIAL SEQUENCE
  Synthetic Construct
KNPTK

SEQ ID NO: 5044 - protein, 5 aa, ARTIFICIAL SEQUENCE
  Synthetic Construct
KNPYK

SEQ ID NO: 5045 - protein, 5 aa, ARTIFICIAL SEQUENCE
  Synthetic Construct
KNQAK

SEQ ID NO: 5046 - protein, 5 aa, ARTIFICIAL SEQUENCE
  Synthetic Construct
KNQDK

SEQ ID NO: 5047 - protein, 5 aa, ARTIFICIAL SEQUENCE
  Synthetic Construct
KNQEK

SEQ ID NO: 5048 - protein, 5 aa, ARTIFICIAL SEQUENCE
  Synthetic Construct
KNQFK

SEQ ID NO: 5049 - protein, 5 aa, ARTIFICIAL SEQUENCE
  Synthetic Construct
KNQGK

SEQ ID NO: 5050 - protein, 5 aa, ARTIFICIAL SEQUENCE
  Synthetic Construct
KNQHK

SEQ ID NO: 5051 - protein, 5 aa, ARTIFICIAL SEQUENCE
  Synthetic Construct
KNQIK

SEQ ID NO: 5052 - protein, 5 aa, ARTIFICIAL SEQUENCE
  Synthetic Construct
KNQLK

SEQ ID NO: 5053 - protein, 5 aa, ARTIFICIAL SEQUENCE
  Synthetic Construct
KNQNK

SEQ ID NO: 5054 - protein, 5 aa, ARTIFICIAL SEQUENCE
  Synthetic Construct
KNQQK

SEQ ID NO: 5055 - protein, 5 aa, ARTIFICIAL SEQUENCE
  Synthetic Construct
KNQRK

SEQ ID NO: 5056 - protein, 5 aa, ARTIFICIAL SEQUENCE
  Synthetic Construct
KNQSK

SEQ ID NO: 5057 - protein, 5 aa, ARTIFICIAL SEQUENCE
  Synthetic Construct
KNQTK

SEQ ID NO: 5058 - protein, 5 aa, ARTIFICIAL SEQUENCE
  Synthetic Construct
KNQYK

SEQ ID NO: 5059 - protein, 5 aa, ARTIFICIAL SEQUENCE
  Synthetic Construct
KNRAK

SEQ ID NO: 5060 - protein, 5 aa, ARTIFICIAL SEQUENCE
  Synthetic Construct
KNRDK

SEQ ID NO: 5061 - protein, 5 aa, ARTIFICIAL SEQUENCE
  Synthetic Construct
KNREK

SEQ ID NO: 5062 - protein, 5 aa, ARTIFICIAL SEQUENCE
  Synthetic Construct
KNRFK

SEQ ID NO: 5063 - protein, 5 aa, ARTIFICIAL SEQUENCE
  Synthetic Construct
KNRGK

SEQ ID NO: 5064 - protein, 5 aa, ARTIFICIAL SEQUENCE
  Synthetic Construct
KNRHK

SEQ ID NO: 5065 - protein, 5 aa, ARTIFICIAL SEQUENCE
  Synthetic Construct
KNRIK

SEQ ID NO: 5066 - protein, 5 aa, ARTIFICIAL SEQUENCE
  Synthetic Construct
KNRLK

SEQ ID NO: 5067 - protein, 5 aa, ARTIFICIAL SEQUENCE
  Synthetic Construct
KNRNK

SEQ ID NO: 5068 - protein, 5 aa, ARTIFICIAL SEQUENCE
  Synthetic Construct
KNRQK

SEQ ID NO: 5069 - protein, 5 aa, ARTIFICIAL SEQUENCE
  Synthetic Construct
KNRRK

SEQ ID NO: 5070 - protein, 5 aa, ARTIFICIAL SEQUENCE
  Synthetic Construct
KNRSK

SEQ ID NO: 5071 - protein, 5 aa, ARTIFICIAL SEQUENCE
  Synthetic Construct
KNRTK

SEQ ID NO: 5072 - protein, 5 aa, ARTIFICIAL SEQUENCE
  Synthetic Construct
KNRYK

SEQ ID NO: 5073 - protein, 5 aa, ARTIFICIAL SEQUENCE
  Synthetic Construct
KNSAK

SEQ ID NO: 5074 - protein, 5 aa, ARTIFICIAL SEQUENCE
  Synthetic Construct
KNSDK

SEQ ID NO: 5075 - protein, 5 aa, ARTIFICIAL SEQUENCE
  Synthetic Construct
KNSEK

SEQ ID NO: 5076 - protein, 5 aa, ARTIFICIAL SEQUENCE
  Synthetic Construct
KNSFK

SEQ ID NO: 5077 - protein, 5 aa, ARTIFICIAL SEQUENCE
  Synthetic Construct
KNSGK

SEQ ID NO: 5078 - protein, 5 aa, ARTIFICIAL SEQUENCE
  Synthetic Construct
KNSHK

SEQ ID NO: 5079 - protein, 5 aa, ARTIFICIAL SEQUENCE
  Synthetic Construct
KNSIK

SEQ ID NO: 5080 - protein, 5 aa, ARTIFICIAL SEQUENCE
  Synthetic Construct
KNSLK

SEQ ID NO: 5081 - protein, 5 aa, ARTIFICIAL SEQUENCE
  Synthetic Construct
KNSNK

SEQ ID NO: 5082 - protein, 5 aa, ARTIFICIAL SEQUENCE
  Synthetic Construct
KNSQK

SEQ ID NO: 5083 - protein, 5 aa, ARTIFICIAL SEQUENCE
  Synthetic Construct
KNSRK

SEQ ID NO: 5084 - protein, 5 aa, ARTIFICIAL SEQUENCE
  Synthetic Construct
KNSSK

SEQ ID NO: 5085 - protein, 5 aa, ARTIFICIAL SEQUENCE
  Synthetic Construct
KNSTK

SEQ ID NO: 5086 - protein, 5 aa, ARTIFICIAL SEQUENCE
  Synthetic Construct
KNSYK

SEQ ID NO: 5087 - protein, 5 aa, ARTIFICIAL SEQUENCE
  Synthetic Construct
KNTAK

SEQ ID NO: 5088 - protein, 5 aa, ARTIFICIAL SEQUENCE
  Synthetic Construct
KNTDK

SEQ ID NO: 5089 - protein, 5 aa, ARTIFICIAL SEQUENCE
  Synthetic Construct
KNTEK

SEQ ID NO: 5090 - protein, 5 aa, ARTIFICIAL SEQUENCE
  Synthetic Construct
KNTFK

SEQ ID NO: 5091 - protein, 5 aa, ARTIFICIAL SEQUENCE
  Synthetic Construct
KNTGK

SEQ ID NO: 5092 - protein, 5 aa, ARTIFICIAL SEQUENCE
  Synthetic Construct
KNTHK

SEQ ID NO: 5093 - protein, 5 aa, ARTIFICIAL SEQUENCE
  Synthetic Construct
KNTIK

SEQ ID NO: 5094 - protein, 5 aa, ARTIFICIAL SEQUENCE
  Synthetic Construct
KNTLK

SEQ ID NO: 5095 - protein, 5 aa, ARTIFICIAL SEQUENCE
  Synthetic Construct
KNTNK

SEQ ID NO: 5096 - protein, 5 aa, ARTIFICIAL SEQUENCE
  Synthetic Construct
KNTQK

SEQ ID NO: 5097 - protein, 5 aa, ARTIFICIAL SEQUENCE
  Synthetic Construct
KNTRK

SEQ ID NO: 5098 - protein, 5 aa, ARTIFICIAL SEQUENCE
  Synthetic Construct
KNTSK

SEQ ID NO: 5099 - protein, 5 aa, ARTIFICIAL SEQUENCE
  Synthetic Construct
KNTTK

SEQ ID NO: 5100 - protein, 5 aa, ARTIFICIAL SEQUENCE
  Synthetic Construct
KNTYK

SEQ ID NO: 5101 - protein, 5 aa, ARTIFICIAL SEQUENCE
  Synthetic Construct
KNYAK

SEQ ID NO: 5102 - protein, 5 aa, ARTIFICIAL SEQUENCE
  Synthetic Construct
KNYDK

SEQ ID NO: 5103 - protein, 5 aa, ARTIFICIAL SEQUENCE
  Synthetic Construct
KNYEK

SEQ ID NO: 5104 - protein, 5 aa, ARTIFICIAL SEQUENCE
  Synthetic Construct
KNYFK

SEQ ID NO: 5105 - protein, 5 aa, ARTIFICIAL SEQUENCE
  Synthetic Construct
KNYGK

SEQ ID NO: 5106 - protein, 5 aa, ARTIFICIAL SEQUENCE
  Synthetic Construct
KNYHK

SEQ ID NO: 5107 - protein, 5 aa, ARTIFICIAL SEQUENCE
  Synthetic Construct
KNYIK

SEQ ID NO: 5108 - protein, 5 aa, ARTIFICIAL SEQUENCE
  Synthetic Construct
KNYLK

SEQ ID NO: 5109 - protein, 5 aa, ARTIFICIAL SEQUENCE
  Synthetic Construct
KNYNK

SEQ ID NO: 5110 - protein, 5 aa, ARTIFICIAL SEQUENCE
  Synthetic Construct
KNYQK

SEQ ID NO: 5111 - protein, 5 aa, ARTIFICIAL SEQUENCE
  Synthetic Construct
KNYRK

SEQ ID NO: 5112 - protein, 5 aa, ARTIFICIAL SEQUENCE
  Synthetic Construct
KNYSK

SEQ ID NO: 5113 - protein, 5 aa, ARTIFICIAL SEQUENCE
  Synthetic Construct
KNYTK

SEQ ID NO: 5114 - protein, 5 aa, ARTIFICIAL SEQUENCE
  Synthetic Construct
KNYYK

SEQ ID NO: 5115 - protein, 5 aa, ARTIFICIAL SEQUENCE
  Synthetic Construct
KPAAK

SEQ ID NO: 5116 - protein, 5 aa, ARTIFICIAL SEQUENCE
  Synthetic Construct
KPADK

SEQ ID NO: 5117 - protein, 5 aa, ARTIFICIAL SEQUENCE
  Synthetic Construct
KPAEK

SEQ ID NO: 5118 - protein, 5 aa, ARTIFICIAL SEQUENCE
  Synthetic Construct
KPAFK

SEQ ID NO: 5119 - protein, 5 aa, ARTIFICIAL SEQUENCE
  Synthetic Construct
KPAGK

SEQ ID NO: 5120 - protein, 5 aa, ARTIFICIAL SEQUENCE
  Synthetic Construct
KPAHK

SEQ ID NO: 5121 - protein, 5 aa, ARTIFICIAL SEQUENCE
  Synthetic Construct
KPAIK

SEQ ID NO: 5122 - protein, 5 aa, ARTIFICIAL SEQUENCE
  Synthetic Construct
KPALK

SEQ ID NO: 5123 - protein, 5 aa, ARTIFICIAL SEQUENCE
  Synthetic Construct
KPANK

SEQ ID NO: 5124 - protein, 5 aa, ARTIFICIAL SEQUENCE
  Synthetic Construct
KPAQK

SEQ ID NO: 5125 - protein, 5 aa, ARTIFICIAL SEQUENCE
  Synthetic Construct
KPARK

SEQ ID NO: 5126 - protein, 5 aa, ARTIFICIAL SEQUENCE
  Synthetic Construct
KPASK

SEQ ID NO: 5127 - protein, 5 aa, ARTIFICIAL SEQUENCE
  Synthetic Construct
KPATK

SEQ ID NO: 5128 - protein, 5 aa, ARTIFICIAL SEQUENCE
  Synthetic Construct
KPAYK

SEQ ID NO: 5129 - protein, 5 aa, ARTIFICIAL SEQUENCE
  Synthetic Construct
KPDAK

SEQ ID NO: 5130 - protein, 5 aa, ARTIFICIAL SEQUENCE
  Synthetic Construct
KPDDK

SEQ ID NO: 5131 - protein, 5 aa, ARTIFICIAL SEQUENCE
  Synthetic Construct
KPDEK

SEQ ID NO: 5132 - protein, 5 aa, ARTIFICIAL SEQUENCE
  Synthetic Construct
KPDFK

SEQ ID NO: 5133 - protein, 5 aa, ARTIFICIAL SEQUENCE
  Synthetic Construct
KPDGK

SEQ ID NO: 5134 - protein, 5 aa, ARTIFICIAL SEQUENCE
  Synthetic Construct
KPDHK

SEQ ID NO: 5135 - protein, 5 aa, ARTIFICIAL SEQUENCE
  Synthetic Construct
KPDIK

SEQ ID NO: 5136 - protein, 5 aa, ARTIFICIAL SEQUENCE
  Synthetic Construct
KPDLK

SEQ ID NO: 5137 - protein, 5 aa, ARTIFICIAL SEQUENCE
  Synthetic Construct
KPDNK

SEQ ID NO: 5138 - protein, 5 aa, ARTIFICIAL SEQUENCE
  Synthetic Construct
KPDQK

SEQ ID NO: 5139 - protein, 5 aa, ARTIFICIAL SEQUENCE
  Synthetic Construct
KPDRK

SEQ ID NO: 5140 - protein, 5 aa, ARTIFICIAL SEQUENCE
  Synthetic Construct
KPDSK

SEQ ID NO: 5141 - protein, 5 aa, ARTIFICIAL SEQUENCE
  Synthetic Construct
KPDTK

SEQ ID NO: 5142 - protein, 5 aa, ARTIFICIAL SEQUENCE
  Synthetic Construct
KPDYK

SEQ ID NO: 5143 - protein, 5 aa, ARTIFICIAL SEQUENCE
  Synthetic Construct
KPEAK

SEQ ID NO: 5144 - protein, 5 aa, ARTIFICIAL SEQUENCE
  Synthetic Construct
KPEDK

SEQ ID NO: 5145 - protein, 5 aa, ARTIFICIAL SEQUENCE
  Synthetic Construct
KPEEK

SEQ ID NO: 5146 - protein, 5 aa, ARTIFICIAL SEQUENCE
  Synthetic Construct
KPEFK

SEQ ID NO: 5147 - protein, 5 aa, ARTIFICIAL SEQUENCE
  Synthetic Construct
KPEGK

SEQ ID NO: 5148 - protein, 5 aa, ARTIFICIAL SEQUENCE
  Synthetic Construct
KPEHK

SEQ ID NO: 5149 - protein, 5 aa, ARTIFICIAL SEQUENCE
  Synthetic Construct
KPEIK

SEQ ID NO: 5150 - protein, 5 aa, ARTIFICIAL SEQUENCE
  Synthetic Construct
KPELK

SEQ ID NO: 5151 - protein, 5 aa, ARTIFICIAL SEQUENCE
  Synthetic Construct
KPENK

SEQ ID NO: 5152 - protein, 5 aa, ARTIFICIAL SEQUENCE
  Synthetic Construct
KPEQK

SEQ ID NO: 5153 - protein, 5 aa, ARTIFICIAL SEQUENCE
  Synthetic Construct
KPERK

SEQ ID NO: 5154 - protein, 5 aa, ARTIFICIAL SEQUENCE
  Synthetic Construct
KPESK

SEQ ID NO: 5155 - protein, 5 aa, ARTIFICIAL SEQUENCE
  Synthetic Construct
KPETK

SEQ ID NO: 5156 - protein, 5 aa, ARTIFICIAL SEQUENCE
  Synthetic Construct
KPEYK

SEQ ID NO: 5157 - protein, 5 aa, ARTIFICIAL SEQUENCE
  Synthetic Construct
KPFAK

SEQ ID NO: 5158 - protein, 5 aa, ARTIFICIAL SEQUENCE
  Synthetic Construct
KPFDK

SEQ ID NO: 5159 - protein, 5 aa, ARTIFICIAL SEQUENCE
  Synthetic Construct
KPFEK

SEQ ID NO: 5160 - protein, 5 aa, ARTIFICIAL SEQUENCE
  Synthetic Construct
KPFFK

SEQ ID NO: 5161 - protein, 5 aa, ARTIFICIAL SEQUENCE
  Synthetic Construct
KPFGK

SEQ ID NO: 5162 - protein, 5 aa, ARTIFICIAL SEQUENCE
  Synthetic Construct
KPFHK

SEQ ID NO: 5163 - protein, 5 aa, ARTIFICIAL SEQUENCE
  Synthetic Construct
KPFIK

SEQ ID NO: 5164 - protein, 5 aa, ARTIFICIAL SEQUENCE
  Synthetic Construct
KPFLK

SEQ ID NO: 5165 - protein, 5 aa, ARTIFICIAL SEQUENCE
  Synthetic Construct
KPFNK

SEQ ID NO: 5166 - protein, 5 aa, ARTIFICIAL SEQUENCE
  Synthetic Construct
KPFQK

SEQ ID NO: 5167 - protein, 5 aa, ARTIFICIAL SEQUENCE
  Synthetic Construct
KPFRK

SEQ ID NO: 5168 - protein, 5 aa, ARTIFICIAL SEQUENCE
  Synthetic Construct
KPFSK

SEQ ID NO: 5169 - protein, 5 aa, ARTIFICIAL SEQUENCE
  Synthetic Construct
KPFTK

SEQ ID NO: 5170 - protein, 5 aa, ARTIFICIAL SEQUENCE
  Synthetic Construct
KPFYK

SEQ ID NO: 5171 - protein, 5 aa, ARTIFICIAL SEQUENCE
  Synthetic Construct
KPGAK

SEQ ID NO: 5172 - protein, 5 aa, ARTIFICIAL SEQUENCE
  Synthetic Construct
KPGDK

SEQ ID NO: 5173 - protein, 5 aa, ARTIFICIAL SEQUENCE
  Synthetic Construct
KPGEK

SEQ ID NO: 5174 - protein, 5 aa, ARTIFICIAL SEQUENCE
  Synthetic Construct
KPGFK

SEQ ID NO: 5175 - protein, 5 aa, ARTIFICIAL SEQUENCE
  Synthetic Construct
KPGGK

SEQ ID NO: 5176 - protein, 5 aa, ARTIFICIAL SEQUENCE
  Synthetic Construct
KPGHK

SEQ ID NO: 5177 - protein, 5 aa, ARTIFICIAL SEQUENCE
  Synthetic Construct
KPGIK

SEQ ID NO: 5178 - protein, 5 aa, ARTIFICIAL SEQUENCE
  Synthetic Construct
KPGLK

SEQ ID NO: 5179 - protein, 5 aa, ARTIFICIAL SEQUENCE
  Synthetic Construct
KPGNK

SEQ ID NO: 5180 - protein, 5 aa, ARTIFICIAL SEQUENCE
  Synthetic Construct
KPGQK

SEQ ID NO: 5181 - protein, 5 aa, ARTIFICIAL SEQUENCE
  Synthetic Construct
KPGRK

SEQ ID NO: 5182 - protein, 5 aa, ARTIFICIAL SEQUENCE
  Synthetic Construct
KPGSK

SEQ ID NO: 5183 - protein, 5 aa, ARTIFICIAL SEQUENCE
  Synthetic Construct
KPGTK

SEQ ID NO: 5184 - protein, 5 aa, ARTIFICIAL SEQUENCE
  Synthetic Construct
KPGYK

SEQ ID NO: 5185 - protein, 5 aa, ARTIFICIAL SEQUENCE
  Synthetic Construct
KPHAK

SEQ ID NO: 5186 - protein, 5 aa, ARTIFICIAL SEQUENCE
  Synthetic Construct
KPHDK

SEQ ID NO: 5187 - protein, 5 aa, ARTIFICIAL SEQUENCE
  Synthetic Construct
KPHEK

SEQ ID NO: 5188 - protein, 5 aa, ARTIFICIAL SEQUENCE
  Synthetic Construct
KPHFK

SEQ ID NO: 5189 - protein, 5 aa, ARTIFICIAL SEQUENCE
  Synthetic Construct
KPHGK

SEQ ID NO: 5190 - protein, 5 aa, ARTIFICIAL SEQUENCE
  Synthetic Construct
KPHHK

SEQ ID NO: 5191 - protein, 5 aa, ARTIFICIAL SEQUENCE
  Synthetic Construct
KPHIK

SEQ ID NO: 5192 - protein, 5 aa, ARTIFICIAL SEQUENCE
  Synthetic Construct
KPHLK

SEQ ID NO: 5193 - protein, 5 aa, ARTIFICIAL SEQUENCE
  Synthetic Construct
KPHNK

SEQ ID NO: 5194 - protein, 5 aa, ARTIFICIAL SEQUENCE
  Synthetic Construct
KPHQK

SEQ ID NO: 5195 - protein, 5 aa, ARTIFICIAL SEQUENCE
  Synthetic Construct
KPHRK

SEQ ID NO: 5196 - protein, 5 aa, ARTIFICIAL SEQUENCE
  Synthetic Construct
KPHSK

SEQ ID NO: 5197 - protein, 5 aa, ARTIFICIAL SEQUENCE
  Synthetic Construct
KPHTK

SEQ ID NO: 5198 - protein, 5 aa, ARTIFICIAL SEQUENCE
  Synthetic Construct
KPHYK

SEQ ID NO: 5199 - protein, 5 aa, ARTIFICIAL SEQUENCE
  Synthetic Construct
KPIAK

SEQ ID NO: 5200 - protein, 5 aa, ARTIFICIAL SEQUENCE
  Synthetic Construct
KPIDK

SEQ ID NO: 5201 - protein, 5 aa, ARTIFICIAL SEQUENCE
  Synthetic Construct
KPIEK

SEQ ID NO: 5202 - protein, 5 aa, ARTIFICIAL SEQUENCE
  Synthetic Construct
KPIFK

SEQ ID NO: 5203 - protein, 5 aa, ARTIFICIAL SEQUENCE
  Synthetic Construct
KPIGK

SEQ ID NO: 5204 - protein, 5 aa, ARTIFICIAL SEQUENCE
  Synthetic Construct
KPIHK

SEQ ID NO: 5205 - protein, 5 aa, ARTIFICIAL SEQUENCE
  Synthetic Construct
KPIIK

SEQ ID NO: 5206 - protein, 5 aa, ARTIFICIAL SEQUENCE
  Synthetic Construct
KPILK

SEQ ID NO: 5207 - protein, 5 aa, ARTIFICIAL SEQUENCE
  Synthetic Construct
KPINK

SEQ ID NO: 5208 - protein, 5 aa, ARTIFICIAL SEQUENCE
  Synthetic Construct
KPIQK

SEQ ID NO: 5209 - protein, 5 aa, ARTIFICIAL SEQUENCE
  Synthetic Construct
KPIRK

SEQ ID NO: 5210 - protein, 5 aa, ARTIFICIAL SEQUENCE
  Synthetic Construct
KPISK

SEQ ID NO: 5211 - protein, 5 aa, ARTIFICIAL SEQUENCE
  Synthetic Construct
KPITK

SEQ ID NO: 5212 - protein, 5 aa, ARTIFICIAL SEQUENCE
  Synthetic Construct
KPIYK

SEQ ID NO: 5213 - protein, 5 aa, ARTIFICIAL SEQUENCE
  Synthetic Construct
KPLAK

SEQ ID NO: 5214 - protein, 5 aa, ARTIFICIAL SEQUENCE
  Synthetic Construct
KPLDK

SEQ ID NO: 5215 - protein, 5 aa, ARTIFICIAL SEQUENCE
  Synthetic Construct
KPLEK

SEQ ID NO: 5216 - protein, 5 aa, ARTIFICIAL SEQUENCE
  Synthetic Construct
KPLFK

SEQ ID NO: 5217 - protein, 5 aa, ARTIFICIAL SEQUENCE
  Synthetic Construct
KPLGK

SEQ ID NO: 5218 - protein, 5 aa, ARTIFICIAL SEQUENCE
  Synthetic Construct
KPLHK

SEQ ID NO: 5219 - protein, 5 aa, ARTIFICIAL SEQUENCE
  Synthetic Construct
KPLIK

SEQ ID NO: 5220 - protein, 5 aa, ARTIFICIAL SEQUENCE
  Synthetic Construct
KPLLK

SEQ ID NO: 5221 - protein, 5 aa, ARTIFICIAL SEQUENCE
  Synthetic Construct
KPLNK

SEQ ID NO: 5222 - protein, 5 aa, ARTIFICIAL SEQUENCE
  Synthetic Construct
KPLQK

SEQ ID NO: 5223 - protein, 5 aa, ARTIFICIAL SEQUENCE
  Synthetic Construct
KPLRK

SEQ ID NO: 5224 - protein, 5 aa, ARTIFICIAL SEQUENCE
  Synthetic Construct
KPLSK

SEQ ID NO: 5225 - protein, 5 aa, ARTIFICIAL SEQUENCE
  Synthetic Construct
KPLTK

SEQ ID NO: 5226 - protein, 5 aa, ARTIFICIAL SEQUENCE
  Synthetic Construct
KPLYK

SEQ ID NO: 5227 - protein, 5 aa, ARTIFICIAL SEQUENCE
  Synthetic Construct
KPNAK

SEQ ID NO: 5228 - protein, 5 aa, ARTIFICIAL SEQUENCE
  Synthetic Construct
KPNDK

SEQ ID NO: 5229 - protein, 5 aa, ARTIFICIAL SEQUENCE
  Synthetic Construct
KPNEK

SEQ ID NO: 5230 - protein, 5 aa, ARTIFICIAL SEQUENCE
  Synthetic Construct
KPNFK

SEQ ID NO: 5231 - protein, 5 aa, ARTIFICIAL SEQUENCE
  Synthetic Construct
KPNGK

SEQ ID NO: 5232 - protein, 5 aa, ARTIFICIAL SEQUENCE
  Synthetic Construct
KPNHK

SEQ ID NO: 5233 - protein, 5 aa, ARTIFICIAL SEQUENCE
  Synthetic Construct
KPNIK

SEQ ID NO: 5234 - protein, 5 aa, ARTIFICIAL SEQUENCE
  Synthetic Construct
KPNLK

SEQ ID NO: 5235 - protein, 5 aa, ARTIFICIAL SEQUENCE
  Synthetic Construct
KPNNK

SEQ ID NO: 5236 - protein, 5 aa, ARTIFICIAL SEQUENCE
  Synthetic Construct
KPNQK

SEQ ID NO: 5237 - protein, 5 aa, ARTIFICIAL SEQUENCE
  Synthetic Construct
KPNRK

SEQ ID NO: 5238 - protein, 5 aa, ARTIFICIAL SEQUENCE
  Synthetic Construct
KPNSK

SEQ ID NO: 5239 - protein, 5 aa, ARTIFICIAL SEQUENCE
  Synthetic Construct
KPNTK

SEQ ID NO: 5240 - protein, 5 aa, ARTIFICIAL SEQUENCE
  Synthetic Construct
KPNYK

SEQ ID NO: 5241 - protein, 5 aa, ARTIFICIAL SEQUENCE
  Synthetic Construct
KPPAK

SEQ ID NO: 5242 - protein, 5 aa, ARTIFICIAL SEQUENCE
  Synthetic Construct
KPPDK

SEQ ID NO: 5243 - protein, 5 aa, ARTIFICIAL SEQUENCE
  Synthetic Construct
KPPEK

SEQ ID NO: 5244 - protein, 5 aa, ARTIFICIAL SEQUENCE
  Synthetic Construct
KPPFK

SEQ ID NO: 5245 - protein, 5 aa, ARTIFICIAL SEQUENCE
  Synthetic Construct
KPPGK

SEQ ID NO: 5246 - protein, 5 aa, ARTIFICIAL SEQUENCE
  Synthetic Construct
KPPHK

SEQ ID NO: 5247 - protein, 5 aa, ARTIFICIAL SEQUENCE
  Synthetic Construct
KPPIK

SEQ ID NO: 5248 - protein, 5 aa, ARTIFICIAL SEQUENCE
  Synthetic Construct
KPPLK

SEQ ID NO: 5249 - protein, 5 aa, ARTIFICIAL SEQUENCE
  Synthetic Construct
KPPNK

SEQ ID NO: 5250 - protein, 5 aa, ARTIFICIAL SEQUENCE
  Synthetic Construct
KPPQK

SEQ ID NO: 5251 - protein, 5 aa, ARTIFICIAL SEQUENCE
  Synthetic Construct
KPPRK

SEQ ID NO: 5252 - protein, 5 aa, ARTIFICIAL SEQUENCE
  Synthetic Construct
KPPSK

SEQ ID NO: 5253 - protein, 5 aa, ARTIFICIAL SEQUENCE
  Synthetic Construct
KPPTK

SEQ ID NO: 5254 - protein, 5 aa, ARTIFICIAL SEQUENCE
  Synthetic Construct
KPPYK

SEQ ID NO: 5255 - protein, 5 aa, ARTIFICIAL SEQUENCE
  Synthetic Construct
KPQAK

SEQ ID NO: 5256 - protein, 5 aa, ARTIFICIAL SEQUENCE
  Synthetic Construct
KPQDK

SEQ ID NO: 5257 - protein, 5 aa, ARTIFICIAL SEQUENCE
  Synthetic Construct
KPQEK

SEQ ID NO: 5258 - protein, 5 aa, ARTIFICIAL SEQUENCE
  Synthetic Construct
KPQFK

SEQ ID NO: 5259 - protein, 5 aa, ARTIFICIAL SEQUENCE
  Synthetic Construct
KPQGK

SEQ ID NO: 5260 - protein, 5 aa, ARTIFICIAL SEQUENCE
  Synthetic Construct
KPQHK

SEQ ID NO: 5261 - protein, 5 aa, ARTIFICIAL SEQUENCE
  Synthetic Construct
KPQIK

SEQ ID NO: 5262 - protein, 5 aa, ARTIFICIAL SEQUENCE
  Synthetic Construct
KPQLK

SEQ ID NO: 5263 - protein, 5 aa, ARTIFICIAL SEQUENCE
  Synthetic Construct
KPQNK

SEQ ID NO: 5264 - protein, 5 aa, ARTIFICIAL SEQUENCE
  Synthetic Construct
KPQQK

SEQ ID NO: 5265 - protein, 5 aa, ARTIFICIAL SEQUENCE
  Synthetic Construct
KPQRK

SEQ ID NO: 5266 - protein, 5 aa, ARTIFICIAL SEQUENCE
  Synthetic Construct
KPQSK

SEQ ID NO: 5267 - protein, 5 aa, ARTIFICIAL SEQUENCE
  Synthetic Construct
KPQTK

SEQ ID NO: 5268 - protein, 5 aa, ARTIFICIAL SEQUENCE
  Synthetic Construct
KPQYK

SEQ ID NO: 5269 - protein, 5 aa, ARTIFICIAL SEQUENCE
  Synthetic Construct
KPRAK

SEQ ID NO: 5270 - protein, 5 aa, ARTIFICIAL SEQUENCE
  Synthetic Construct
KPRDK

SEQ ID NO: 5271 - protein, 5 aa, ARTIFICIAL SEQUENCE
  Synthetic Construct
KPREK

SEQ ID NO: 5272 - protein, 5 aa, ARTIFICIAL SEQUENCE
  Synthetic Construct
KPRFK

SEQ ID NO: 5273 - protein, 5 aa, ARTIFICIAL SEQUENCE
  Synthetic Construct
KPRGK

SEQ ID NO: 5274 - protein, 5 aa, ARTIFICIAL SEQUENCE
  Synthetic Construct
KPRHK

SEQ ID NO: 5275 - protein, 5 aa, ARTIFICIAL SEQUENCE
  Synthetic Construct
KPRIK

SEQ ID NO: 5276 - protein, 5 aa, ARTIFICIAL SEQUENCE
  Synthetic Construct
KPRLK

SEQ ID NO: 5277 - protein, 5 aa, ARTIFICIAL SEQUENCE
  Synthetic Construct
KPRNK

SEQ ID NO: 5278 - protein, 5 aa, ARTIFICIAL SEQUENCE
  Synthetic Construct
KPRQK

SEQ ID NO: 5279 - protein, 5 aa, ARTIFICIAL SEQUENCE
  Synthetic Construct
KPRRK

SEQ ID NO: 5280 - protein, 5 aa, ARTIFICIAL SEQUENCE
  Synthetic Construct
KPRSK

SEQ ID NO: 5281 - protein, 5 aa, ARTIFICIAL SEQUENCE
  Synthetic Construct
KPRTK

SEQ ID NO: 5282 - protein, 5 aa, ARTIFICIAL SEQUENCE
  Synthetic Construct
KPRYK

SEQ ID NO: 5283 - protein, 5 aa, ARTIFICIAL SEQUENCE
  Synthetic Construct
KPSAK

SEQ ID NO: 5284 - protein, 5 aa, ARTIFICIAL SEQUENCE
  Synthetic Construct
KPSDK

SEQ ID NO: 5285 - protein, 5 aa, ARTIFICIAL SEQUENCE
  Synthetic Construct
KPSEK

SEQ ID NO: 5286 - protein, 5 aa, ARTIFICIAL SEQUENCE
  Synthetic Construct
KPSFK

SEQ ID NO: 5287 - protein, 5 aa, ARTIFICIAL SEQUENCE
  Synthetic Construct
KPSGK

SEQ ID NO: 5288 - protein, 5 aa, ARTIFICIAL SEQUENCE
  Synthetic Construct
KPSHK

SEQ ID NO: 5289 - protein, 5 aa, ARTIFICIAL SEQUENCE
  Synthetic Construct
KPSIK

SEQ ID NO: 5290 - protein, 5 aa, ARTIFICIAL SEQUENCE
  Synthetic Construct
KPSLK

SEQ ID NO: 5291 - protein, 5 aa, ARTIFICIAL SEQUENCE
  Synthetic Construct
KPSNK

SEQ ID NO: 5292 - protein, 5 aa, ARTIFICIAL SEQUENCE
  Synthetic Construct
KPSQK

SEQ ID NO: 5293 - protein, 5 aa, ARTIFICIAL SEQUENCE
  Synthetic Construct
KPSRK

SEQ ID NO: 5294 - protein, 5 aa, ARTIFICIAL SEQUENCE
  Synthetic Construct
KPSSK

SEQ ID NO: 5295 - protein, 5 aa, ARTIFICIAL SEQUENCE
  Synthetic Construct
KPSTK

SEQ ID NO: 5296 - protein, 5 aa, ARTIFICIAL SEQUENCE
  Synthetic Construct
KPSYK

SEQ ID NO: 5297 - protein, 5 aa, ARTIFICIAL SEQUENCE
  Synthetic Construct
KPTAK

SEQ ID NO: 5298 - protein, 5 aa, ARTIFICIAL SEQUENCE
  Synthetic Construct
KPTDK

SEQ ID NO: 5299 - protein, 5 aa, ARTIFICIAL SEQUENCE
  Synthetic Construct
KPTEK

SEQ ID NO: 5300 - protein, 5 aa, ARTIFICIAL SEQUENCE
  Synthetic Construct
KPTFK

SEQ ID NO: 5301 - protein, 5 aa, ARTIFICIAL SEQUENCE
  Synthetic Construct
KPTGK

SEQ ID NO: 5302 - protein, 5 aa, ARTIFICIAL SEQUENCE
  Synthetic Construct
KPTHK

SEQ ID NO: 5303 - protein, 5 aa, ARTIFICIAL SEQUENCE
  Synthetic Construct
KPTIK

SEQ ID NO: 5304 - protein, 5 aa, ARTIFICIAL SEQUENCE
  Synthetic Construct
KPTLK

SEQ ID NO: 5305 - protein, 5 aa, ARTIFICIAL SEQUENCE
  Synthetic Construct
KPTNK

SEQ ID NO: 5306 - protein, 5 aa, ARTIFICIAL SEQUENCE
  Synthetic Construct
KPTQK

SEQ ID NO: 5307 - protein, 5 aa, ARTIFICIAL SEQUENCE
  Synthetic Construct
KPTRK

SEQ ID NO: 5308 - protein, 5 aa, ARTIFICIAL SEQUENCE
  Synthetic Construct
KPTSK

SEQ ID NO: 5309 - protein, 5 aa, ARTIFICIAL SEQUENCE
  Synthetic Construct
KPTTK

SEQ ID NO: 5310 - protein, 5 aa, ARTIFICIAL SEQUENCE
  Synthetic Construct
KPTYK

SEQ ID NO: 5311 - protein, 5 aa, ARTIFICIAL SEQUENCE
  Synthetic Construct
KPYAK

SEQ ID NO: 5312 - protein, 5 aa, ARTIFICIAL SEQUENCE
  Synthetic Construct
KPYDK

SEQ ID NO: 5313 - protein, 5 aa, ARTIFICIAL SEQUENCE
  Synthetic Construct
KPYEK

SEQ ID NO: 5314 - protein, 5 aa, ARTIFICIAL SEQUENCE
  Synthetic Construct
KPYFK

SEQ ID NO: 5315 - protein, 5 aa, ARTIFICIAL SEQUENCE
  Synthetic Construct
KPYGK

SEQ ID NO: 5316 - protein, 5 aa, ARTIFICIAL SEQUENCE
  Synthetic Construct
KPYHK

SEQ ID NO: 5317 - protein, 5 aa, ARTIFICIAL SEQUENCE
  Synthetic Construct
KPYIK

SEQ ID NO: 5318 - protein, 5 aa, ARTIFICIAL SEQUENCE
  Synthetic Construct
KPYLK

SEQ ID NO: 5319 - protein, 5 aa, ARTIFICIAL SEQUENCE
  Synthetic Construct
KPYNK

SEQ ID NO: 5320 - protein, 5 aa, ARTIFICIAL SEQUENCE
  Synthetic Construct
KPYQK

SEQ ID NO: 5321 - protein, 5 aa, ARTIFICIAL SEQUENCE
  Synthetic Construct
KPYRK

SEQ ID NO: 5322 - protein, 5 aa, ARTIFICIAL SEQUENCE
  Synthetic Construct
KPYSK

SEQ ID NO: 5323 - protein, 5 aa, ARTIFICIAL SEQUENCE
  Synthetic Construct
KPYTK

SEQ ID NO: 5324 - protein, 5 aa, ARTIFICIAL SEQUENCE
  Synthetic Construct
KPYYK

SEQ ID NO: 5325 - protein, 5 aa, ARTIFICIAL SEQUENCE
  Synthetic Construct
KQAAK

SEQ ID NO: 5326 - protein, 5 aa, ARTIFICIAL SEQUENCE
  Synthetic Construct
KQADK

SEQ ID NO: 5327 - protein, 5 aa, ARTIFICIAL SEQUENCE
  Synthetic Construct
KQAEK

SEQ ID NO: 5328 - protein, 5 aa, ARTIFICIAL SEQUENCE
  Synthetic Construct
KQAFK

SEQ ID NO: 5329 - protein, 5 aa, ARTIFICIAL SEQUENCE
  Synthetic Construct
KQAGK

SEQ ID NO: 5330 - protein, 5 aa, ARTIFICIAL SEQUENCE
  Synthetic Construct
KQAHK

SEQ ID NO: 5331 - protein, 5 aa, ARTIFICIAL SEQUENCE
  Synthetic Construct
KQAIK

SEQ ID NO: 5332 - protein, 5 aa, ARTIFICIAL SEQUENCE
  Synthetic Construct
KQALK

SEQ ID NO: 5333 - protein, 5 aa, ARTIFICIAL SEQUENCE
  Synthetic Construct
KQANK

SEQ ID NO: 5334 - protein, 5 aa, ARTIFICIAL SEQUENCE
  Synthetic Construct
KQAQK

SEQ ID NO: 5335 - protein, 5 aa, ARTIFICIAL SEQUENCE
  Synthetic Construct
KQARK

SEQ ID NO: 5336 - protein, 5 aa, ARTIFICIAL SEQUENCE
  Synthetic Construct
KQASK

SEQ ID NO: 5337 - protein, 5 aa, ARTIFICIAL SEQUENCE
  Synthetic Construct
KQATK

SEQ ID NO: 5338 - protein, 5 aa, ARTIFICIAL SEQUENCE
  Synthetic Construct
KQAYK

SEQ ID NO: 5339 - protein, 5 aa, ARTIFICIAL SEQUENCE
  Synthetic Construct
KQDAK

SEQ ID NO: 5340 - protein, 5 aa, ARTIFICIAL SEQUENCE
  Synthetic Construct
KQDDK

SEQ ID NO: 5341 - protein, 5 aa, ARTIFICIAL SEQUENCE
  Synthetic Construct
KQDEK

SEQ ID NO: 5342 - protein, 5 aa, ARTIFICIAL SEQUENCE
  Synthetic Construct
KQDFK

SEQ ID NO: 5343 - protein, 5 aa, ARTIFICIAL SEQUENCE
  Synthetic Construct
KQDGK

SEQ ID NO: 5344 - protein, 5 aa, ARTIFICIAL SEQUENCE
  Synthetic Construct
KQDHK

SEQ ID NO: 5345 - protein, 5 aa, ARTIFICIAL SEQUENCE
  Synthetic Construct
KQDIK

SEQ ID NO: 5346 - protein, 5 aa, ARTIFICIAL SEQUENCE
  Synthetic Construct
KQDLK

SEQ ID NO: 5347 - protein, 5 aa, ARTIFICIAL SEQUENCE
  Synthetic Construct
KQDNK

SEQ ID NO: 5348 - protein, 5 aa, ARTIFICIAL SEQUENCE
  Synthetic Construct
KQDQK

SEQ ID NO: 5349 - protein, 5 aa, ARTIFICIAL SEQUENCE
  Synthetic Construct
KQDRK

SEQ ID NO: 5350 - protein, 5 aa, ARTIFICIAL SEQUENCE
  Synthetic Construct
KQDSK

SEQ ID NO: 5351 - protein, 5 aa, ARTIFICIAL SEQUENCE
  Synthetic Construct
KQDTK

SEQ ID NO: 5352 - protein, 5 aa, ARTIFICIAL SEQUENCE
  Synthetic Construct
KQDYK

SEQ ID NO: 5353 - protein, 5 aa, ARTIFICIAL SEQUENCE
  Synthetic Construct
KQEAK

SEQ ID NO: 5354 - protein, 5 aa, ARTIFICIAL SEQUENCE
  Synthetic Construct
KQEDK

SEQ ID NO: 5355 - protein, 5 aa, ARTIFICIAL SEQUENCE
  Synthetic Construct
KQEEK

SEQ ID NO: 5356 - protein, 5 aa, ARTIFICIAL SEQUENCE
  Synthetic Construct
KQEFK

SEQ ID NO: 5357 - protein, 5 aa, ARTIFICIAL SEQUENCE
  Synthetic Construct
KQEGK

SEQ ID NO: 5358 - protein, 5 aa, ARTIFICIAL SEQUENCE
  Synthetic Construct
KQEHK

SEQ ID NO: 5359 - protein, 5 aa, ARTIFICIAL SEQUENCE
  Synthetic Construct
KQEIK

SEQ ID NO: 5360 - protein, 5 aa, ARTIFICIAL SEQUENCE
  Synthetic Construct
KQELK

SEQ ID NO: 5361 - protein, 5 aa, ARTIFICIAL SEQUENCE
  Synthetic Construct
KQENK

SEQ ID NO: 5362 - protein, 5 aa, ARTIFICIAL SEQUENCE
  Synthetic Construct
KQEQK

SEQ ID NO: 5363 - protein, 5 aa, ARTIFICIAL SEQUENCE
  Synthetic Construct
KQERK

SEQ ID NO: 5364 - protein, 5 aa, ARTIFICIAL SEQUENCE
  Synthetic Construct
KQESK

SEQ ID NO: 5365 - protein, 5 aa, ARTIFICIAL SEQUENCE
  Synthetic Construct
KQETK

SEQ ID NO: 5366 - protein, 5 aa, ARTIFICIAL SEQUENCE
  Synthetic Construct
KQEYK

SEQ ID NO: 5367 - protein, 5 aa, ARTIFICIAL SEQUENCE
  Synthetic Construct
KQFAK

SEQ ID NO: 5368 - protein, 5 aa, ARTIFICIAL SEQUENCE
  Synthetic Construct
KQFDK

SEQ ID NO: 5369 - protein, 5 aa, ARTIFICIAL SEQUENCE
  Synthetic Construct
KQFEK

SEQ ID NO: 5370 - protein, 5 aa, ARTIFICIAL SEQUENCE
  Synthetic Construct
KQFFK

SEQ ID NO: 5371 - protein, 5 aa, ARTIFICIAL SEQUENCE
  Synthetic Construct
KQFGK

SEQ ID NO: 5372 - protein, 5 aa, ARTIFICIAL SEQUENCE
  Synthetic Construct
KQFHK

SEQ ID NO: 5373 - protein, 5 aa, ARTIFICIAL SEQUENCE
  Synthetic Construct
KQFIK

SEQ ID NO: 5374 - protein, 5 aa, ARTIFICIAL SEQUENCE
  Synthetic Construct
KQFLK

SEQ ID NO: 5375 - protein, 5 aa, ARTIFICIAL SEQUENCE
  Synthetic Construct
KQFNK

SEQ ID NO: 5376 - protein, 5 aa, ARTIFICIAL SEQUENCE
  Synthetic Construct
KQFQK

SEQ ID NO: 5377 - protein, 5 aa, ARTIFICIAL SEQUENCE
  Synthetic Construct
KQFRK

SEQ ID NO: 5378 - protein, 5 aa, ARTIFICIAL SEQUENCE
  Synthetic Construct
KQFSK

SEQ ID NO: 5379 - protein, 5 aa, ARTIFICIAL SEQUENCE
  Synthetic Construct
KQFTK

SEQ ID NO: 5380 - protein, 5 aa, ARTIFICIAL SEQUENCE
  Synthetic Construct
KQFYK

SEQ ID NO: 5381 - protein, 5 aa, ARTIFICIAL SEQUENCE
  Synthetic Construct
KQGAK

SEQ ID NO: 5382 - protein, 5 aa, ARTIFICIAL SEQUENCE
  Synthetic Construct
KQGDK

SEQ ID NO: 5383 - protein, 5 aa, ARTIFICIAL SEQUENCE
  Synthetic Construct
KQGEK

SEQ ID NO: 5384 - protein, 5 aa, ARTIFICIAL SEQUENCE
  Synthetic Construct
KQGFK

SEQ ID NO: 5385 - protein, 5 aa, ARTIFICIAL SEQUENCE
  Synthetic Construct
KQGGK

SEQ ID NO: 5386 - protein, 5 aa, ARTIFICIAL SEQUENCE
  Synthetic Construct
KQGHK

SEQ ID NO: 5387 - protein, 5 aa, ARTIFICIAL SEQUENCE
  Synthetic Construct
KQGIK

SEQ ID NO: 5388 - protein, 5 aa, ARTIFICIAL SEQUENCE
  Synthetic Construct
KQGLK

SEQ ID NO: 5389 - protein, 5 aa, ARTIFICIAL SEQUENCE
  Synthetic Construct
KQGNK

SEQ ID NO: 5390 - protein, 5 aa, ARTIFICIAL SEQUENCE
  Synthetic Construct
KQGQK

SEQ ID NO: 5391 - protein, 5 aa, ARTIFICIAL SEQUENCE
  Synthetic Construct
KQGRK

SEQ ID NO: 5392 - protein, 5 aa, ARTIFICIAL SEQUENCE
  Synthetic Construct
KQGSK

SEQ ID NO: 5393 - protein, 5 aa, ARTIFICIAL SEQUENCE
  Synthetic Construct
KQGTK

SEQ ID NO: 5394 - protein, 5 aa, ARTIFICIAL SEQUENCE
  Synthetic Construct
KQGYK

SEQ ID NO: 5395 - protein, 5 aa, ARTIFICIAL SEQUENCE
  Synthetic Construct
KQHAK

SEQ ID NO: 5396 - protein, 5 aa, ARTIFICIAL SEQUENCE
  Synthetic Construct
KQHDK

SEQ ID NO: 5397 - protein, 5 aa, ARTIFICIAL SEQUENCE
  Synthetic Construct
KQHEK

SEQ ID NO: 5398 - protein, 5 aa, ARTIFICIAL SEQUENCE
  Synthetic Construct
KQHFK

SEQ ID NO: 5399 - protein, 5 aa, ARTIFICIAL SEQUENCE
  Synthetic Construct
KQHGK

SEQ ID NO: 5400 - protein, 5 aa, ARTIFICIAL SEQUENCE
  Synthetic Construct
KQHHK

SEQ ID NO: 5401 - protein, 5 aa, ARTIFICIAL SEQUENCE
  Synthetic Construct
KQHIK

SEQ ID NO: 5402 - protein, 5 aa, ARTIFICIAL SEQUENCE
  Synthetic Construct
KQHLK

SEQ ID NO: 5403 - protein, 5 aa, ARTIFICIAL SEQUENCE
  Synthetic Construct
KQHNK

SEQ ID NO: 5404 - protein, 5 aa, ARTIFICIAL SEQUENCE
  Synthetic Construct
KQHQK

SEQ ID NO: 5405 - protein, 5 aa, ARTIFICIAL SEQUENCE
  Synthetic Construct
KQHRK

SEQ ID NO: 5406 - protein, 5 aa, ARTIFICIAL SEQUENCE
  Synthetic Construct
KQHSK

SEQ ID NO: 5407 - protein, 5 aa, ARTIFICIAL SEQUENCE
  Synthetic Construct
KQHTK

SEQ ID NO: 5408 - protein, 5 aa, ARTIFICIAL SEQUENCE
  Synthetic Construct
KQHYK

SEQ ID NO: 5409 - protein, 5 aa, ARTIFICIAL SEQUENCE
  Synthetic Construct
KQIAK

SEQ ID NO: 5410 - protein, 5 aa, ARTIFICIAL SEQUENCE
  Synthetic Construct
KQIDK

SEQ ID NO: 5411 - protein, 5 aa, ARTIFICIAL SEQUENCE
  Synthetic Construct
KQIEK

SEQ ID NO: 5412 - protein, 5 aa, ARTIFICIAL SEQUENCE
  Synthetic Construct
KQIFK

SEQ ID NO: 5413 - protein, 5 aa, ARTIFICIAL SEQUENCE
  Synthetic Construct
KQIGK

SEQ ID NO: 5414 - protein, 5 aa, ARTIFICIAL SEQUENCE
  Synthetic Construct
KQIHK

SEQ ID NO: 5415 - protein, 5 aa, ARTIFICIAL SEQUENCE
  Synthetic Construct
KQIIK

SEQ ID NO: 5416 - protein, 5 aa, ARTIFICIAL SEQUENCE
  Synthetic Construct
KQILK

SEQ ID NO: 5417 - protein, 5 aa, ARTIFICIAL SEQUENCE
  Synthetic Construct
KQINK

SEQ ID NO: 5418 - protein, 5 aa, ARTIFICIAL SEQUENCE
  Synthetic Construct
KQIQK

SEQ ID NO: 5419 - protein, 5 aa, ARTIFICIAL SEQUENCE
  Synthetic Construct
KQIRK

SEQ ID NO: 5420 - protein, 5 aa, ARTIFICIAL SEQUENCE
  Synthetic Construct
KQISK

SEQ ID NO: 5421 - protein, 5 aa, ARTIFICIAL SEQUENCE
  Synthetic Construct
KQITK

SEQ ID NO: 5422 - protein, 5 aa, ARTIFICIAL SEQUENCE
  Synthetic Construct
KQIYK

SEQ ID NO: 5423 - protein, 5 aa, ARTIFICIAL SEQUENCE
  Synthetic Construct
KQLAK

SEQ ID NO: 5424 - protein, 5 aa, ARTIFICIAL SEQUENCE
  Synthetic Construct
KQLDK

SEQ ID NO: 5425 - protein, 5 aa, ARTIFICIAL SEQUENCE
  Synthetic Construct
KQLEK

SEQ ID NO: 5426 - protein, 5 aa, ARTIFICIAL SEQUENCE
  Synthetic Construct
KQLFK

SEQ ID NO: 5427 - protein, 5 aa, ARTIFICIAL SEQUENCE
  Synthetic Construct
KQLGK

SEQ ID NO: 5428 - protein, 5 aa, ARTIFICIAL SEQUENCE
  Synthetic Construct
KQLHK

SEQ ID NO: 5429 - protein, 5 aa, ARTIFICIAL SEQUENCE
  Synthetic Construct
KQLIK

SEQ ID NO: 5430 - protein, 5 aa, ARTIFICIAL SEQUENCE
  Synthetic Construct
KQLLK

SEQ ID NO: 5431 - protein, 5 aa, ARTIFICIAL SEQUENCE
  Synthetic Construct
KQLNK

SEQ ID NO: 5432 - protein, 5 aa, ARTIFICIAL SEQUENCE
  Synthetic Construct
KQLQK

SEQ ID NO: 5433 - protein, 5 aa, ARTIFICIAL SEQUENCE
  Synthetic Construct
KQLRK

SEQ ID NO: 5434 - protein, 5 aa, ARTIFICIAL SEQUENCE
  Synthetic Construct
KQLSK

SEQ ID NO: 5435 - protein, 5 aa, ARTIFICIAL SEQUENCE
  Synthetic Construct
KQLTK

SEQ ID NO: 5436 - protein, 5 aa, ARTIFICIAL SEQUENCE
  Synthetic Construct
KQLYK

SEQ ID NO: 5437 - protein, 5 aa, ARTIFICIAL SEQUENCE
  Synthetic Construct
KQNAK

SEQ ID NO: 5438 - protein, 5 aa, ARTIFICIAL SEQUENCE
  Synthetic Construct
KQNDK

SEQ ID NO: 5439 - protein, 5 aa, ARTIFICIAL SEQUENCE
  Synthetic Construct
KQNEK

SEQ ID NO: 5440 - protein, 5 aa, ARTIFICIAL SEQUENCE
  Synthetic Construct
KQNFK

SEQ ID NO: 5441 - protein, 5 aa, ARTIFICIAL SEQUENCE
  Synthetic Construct
KQNGK

SEQ ID NO: 5442 - protein, 5 aa, ARTIFICIAL SEQUENCE
  Synthetic Construct
KQNHK

SEQ ID NO: 5443 - protein, 5 aa, ARTIFICIAL SEQUENCE
  Synthetic Construct
KQNIK

SEQ ID NO: 5444 - protein, 5 aa, ARTIFICIAL SEQUENCE
  Synthetic Construct
KQNLK

SEQ ID NO: 5445 - protein, 5 aa, ARTIFICIAL SEQUENCE
  Synthetic Construct
KQNNK

SEQ ID NO: 5446 - protein, 5 aa, ARTIFICIAL SEQUENCE
  Synthetic Construct
KQNQK

SEQ ID NO: 5447 - protein, 5 aa, ARTIFICIAL SEQUENCE
  Synthetic Construct
KQNRK

SEQ ID NO: 5448 - protein, 5 aa, ARTIFICIAL SEQUENCE
  Synthetic Construct
KQNSK

SEQ ID NO: 5449 - protein, 5 aa, ARTIFICIAL SEQUENCE
  Synthetic Construct
KQNTK

SEQ ID NO: 5450 - protein, 5 aa, ARTIFICIAL SEQUENCE
  Synthetic Construct
KQNYK

SEQ ID NO: 5451 - protein, 5 aa, ARTIFICIAL SEQUENCE
  Synthetic Construct
KQPAK

SEQ ID NO: 5452 - protein, 5 aa, ARTIFICIAL SEQUENCE
  Synthetic Construct
KQPDK

SEQ ID NO: 5453 - protein, 5 aa, ARTIFICIAL SEQUENCE
  Synthetic Construct
KQPEK

SEQ ID NO: 5454 - protein, 5 aa, ARTIFICIAL SEQUENCE
  Synthetic Construct
KQPFK

SEQ ID NO: 5455 - protein, 5 aa, ARTIFICIAL SEQUENCE
  Synthetic Construct
KQPGK

SEQ ID NO: 5456 - protein, 5 aa, ARTIFICIAL SEQUENCE
  Synthetic Construct
KQPHK

SEQ ID NO: 5457 - protein, 5 aa, ARTIFICIAL SEQUENCE
  Synthetic Construct
KQPIK

SEQ ID NO: 5458 - protein, 5 aa, ARTIFICIAL SEQUENCE
  Synthetic Construct
KQPLK

SEQ ID NO: 5459 - protein, 5 aa, ARTIFICIAL SEQUENCE
  Synthetic Construct
KQPNK

SEQ ID NO: 5460 - protein, 5 aa, ARTIFICIAL SEQUENCE
  Synthetic Construct
KQPQK

SEQ ID NO: 5461 - protein, 5 aa, ARTIFICIAL SEQUENCE
  Synthetic Construct
KQPRK

SEQ ID NO: 5462 - protein, 5 aa, ARTIFICIAL SEQUENCE
  Synthetic Construct
KQPSK

SEQ ID NO: 5463 - protein, 5 aa, ARTIFICIAL SEQUENCE
  Synthetic Construct
KQPTK

SEQ ID NO: 5464 - protein, 5 aa, ARTIFICIAL SEQUENCE
  Synthetic Construct
KQPYK

SEQ ID NO: 5465 - protein, 5 aa, ARTIFICIAL SEQUENCE
  Synthetic Construct
KQQAK

SEQ ID NO: 5466 - protein, 5 aa, ARTIFICIAL SEQUENCE
  Synthetic Construct
KQQDK

SEQ ID NO: 5467 - protein, 5 aa, ARTIFICIAL SEQUENCE
  Synthetic Construct
KQQEK

SEQ ID NO: 5468 - protein, 5 aa, ARTIFICIAL SEQUENCE
  Synthetic Construct
KQQFK

SEQ ID NO: 5469 - protein, 5 aa, ARTIFICIAL SEQUENCE
  Synthetic Construct
KQQGK

SEQ ID NO: 5470 - protein, 5 aa, ARTIFICIAL SEQUENCE
  Synthetic Construct
KQQHK

SEQ ID NO: 5471 - protein, 5 aa, ARTIFICIAL SEQUENCE
  Synthetic Construct
KQQIK

SEQ ID NO: 5472 - protein, 5 aa, ARTIFICIAL SEQUENCE
  Synthetic Construct
KQQLK

SEQ ID NO: 5473 - protein, 5 aa, ARTIFICIAL SEQUENCE
  Synthetic Construct
KQQNK

SEQ ID NO: 5474 - protein, 5 aa, ARTIFICIAL SEQUENCE
  Synthetic Construct
KQQQK

SEQ ID NO: 5475 - protein, 5 aa, ARTIFICIAL SEQUENCE
  Synthetic Construct
KQQRK

SEQ ID NO: 5476 - protein, 5 aa, ARTIFICIAL SEQUENCE
  Synthetic Construct
KQQSK

SEQ ID NO: 5477 - protein, 5 aa, ARTIFICIAL SEQUENCE
  Synthetic Construct
KQQTK

SEQ ID NO: 5478 - protein, 5 aa, ARTIFICIAL SEQUENCE
  Synthetic Construct
KQQYK

SEQ ID NO: 5479 - protein, 5 aa, ARTIFICIAL SEQUENCE
  Synthetic Construct
KQRAK

SEQ ID NO: 5480 - protein, 5 aa, ARTIFICIAL SEQUENCE
  Synthetic Construct
KQRDK

SEQ ID NO: 5481 - protein, 5 aa, ARTIFICIAL SEQUENCE
  Synthetic Construct
KQREK

SEQ ID NO: 5482 - protein, 5 aa, ARTIFICIAL SEQUENCE
  Synthetic Construct
KQRFK

SEQ ID NO: 5483 - protein, 5 aa, ARTIFICIAL SEQUENCE
  Synthetic Construct
KQRGK

SEQ ID NO: 5484 - protein, 5 aa, ARTIFICIAL SEQUENCE
  Synthetic Construct
KQRHK

SEQ ID NO: 5485 - protein, 5 aa, ARTIFICIAL SEQUENCE
  Synthetic Construct
KQRIK

SEQ ID NO: 5486 - protein, 5 aa, ARTIFICIAL SEQUENCE
  Synthetic Construct
KQRLK

SEQ ID NO: 5487 - protein, 5 aa, ARTIFICIAL SEQUENCE
  Synthetic Construct
KQRNK

SEQ ID NO: 5488 - protein, 5 aa, ARTIFICIAL SEQUENCE
  Synthetic Construct
KQRQK

SEQ ID NO: 5489 - protein, 5 aa, ARTIFICIAL SEQUENCE
  Synthetic Construct
KQRRK

SEQ ID NO: 5490 - protein, 5 aa, ARTIFICIAL SEQUENCE
  Synthetic Construct
KQRSK

SEQ ID NO: 5491 - protein, 5 aa, ARTIFICIAL SEQUENCE
  Synthetic Construct
KQRTK

SEQ ID NO: 5492 - protein, 5 aa, ARTIFICIAL SEQUENCE
  Synthetic Construct
KQRYK

SEQ ID NO: 5493 - protein, 5 aa, ARTIFICIAL SEQUENCE
  Synthetic Construct
KQSAK

SEQ ID NO: 5494 - protein, 5 aa, ARTIFICIAL SEQUENCE
  Synthetic Construct
KQSDK

SEQ ID NO: 5495 - protein, 5 aa, ARTIFICIAL SEQUENCE
  Synthetic Construct
KQSEK

SEQ ID NO: 5496 - protein, 5 aa, ARTIFICIAL SEQUENCE
  Synthetic Construct
KQSFK

SEQ ID NO: 5497 - protein, 5 aa, ARTIFICIAL SEQUENCE
  Synthetic Construct
KQSGK

SEQ ID NO: 5498 - protein, 5 aa, ARTIFICIAL SEQUENCE
  Synthetic Construct
KQSHK

SEQ ID NO: 5499 - protein, 5 aa, ARTIFICIAL SEQUENCE
  Synthetic Construct
KQSIK

SEQ ID NO: 5500 - protein, 5 aa, ARTIFICIAL SEQUENCE
  Synthetic Construct
KQSLK

SEQ ID NO: 5501 - protein, 5 aa, ARTIFICIAL SEQUENCE
  Synthetic Construct
KQSNK

SEQ ID NO: 5502 - protein, 5 aa, ARTIFICIAL SEQUENCE
  Synthetic Construct
KQSQK

SEQ ID NO: 5503 - protein, 5 aa, ARTIFICIAL SEQUENCE
  Synthetic Construct
KQSRK

SEQ ID NO: 5504 - protein, 5 aa, ARTIFICIAL SEQUENCE
  Synthetic Construct
KQSSK

SEQ ID NO: 5505 - protein, 5 aa, ARTIFICIAL SEQUENCE
  Synthetic Construct
KQSTK

SEQ ID NO: 5506 - protein, 5 aa, ARTIFICIAL SEQUENCE
  Synthetic Construct
KQSYK

SEQ ID NO: 5507 - protein, 5 aa, ARTIFICIAL SEQUENCE
  Synthetic Construct
KQTAK

SEQ ID NO: 5508 - protein, 5 aa, ARTIFICIAL SEQUENCE
  Synthetic Construct
KQTDK

SEQ ID NO: 5509 - protein, 5 aa, ARTIFICIAL SEQUENCE
  Synthetic Construct
KQTEK

SEQ ID NO: 5510 - protein, 5 aa, ARTIFICIAL SEQUENCE
  Synthetic Construct
KQTFK

SEQ ID NO: 5511 - protein, 5 aa, ARTIFICIAL SEQUENCE
  Synthetic Construct
KQTGK

SEQ ID NO: 5512 - protein, 5 aa, ARTIFICIAL SEQUENCE
  Synthetic Construct
KQTHK

SEQ ID NO: 5513 - protein, 5 aa, ARTIFICIAL SEQUENCE
  Synthetic Construct
KQTIK

SEQ ID NO: 5514 - protein, 5 aa, ARTIFICIAL SEQUENCE
  Synthetic Construct
KQTLK

SEQ ID NO: 5515 - protein, 5 aa, ARTIFICIAL SEQUENCE
  Synthetic Construct
KQTNK

SEQ ID NO: 5516 - protein, 5 aa, ARTIFICIAL SEQUENCE
  Synthetic Construct
KQTQK

SEQ ID NO: 5517 - protein, 5 aa, ARTIFICIAL SEQUENCE
  Synthetic Construct
KQTRK

SEQ ID NO: 5518 - protein, 5 aa, ARTIFICIAL SEQUENCE
  Synthetic Construct
KQTSK

SEQ ID NO: 5519 - protein, 5 aa, ARTIFICIAL SEQUENCE
  Synthetic Construct
KQTTK

SEQ ID NO: 5520 - protein, 5 aa, ARTIFICIAL SEQUENCE
  Synthetic Construct
KQTYK

SEQ ID NO: 5521 - protein, 5 aa, ARTIFICIAL SEQUENCE
  Synthetic Construct
KQYAK

SEQ ID NO: 5522 - protein, 5 aa, ARTIFICIAL SEQUENCE
  Synthetic Construct
KQYDK

SEQ ID NO: 5523 - protein, 5 aa, ARTIFICIAL SEQUENCE
  Synthetic Construct
KQYEK

SEQ ID NO: 5524 - protein, 5 aa, ARTIFICIAL SEQUENCE
  Synthetic Construct
KQYFK

SEQ ID NO: 5525 - protein, 5 aa, ARTIFICIAL SEQUENCE
  Synthetic Construct
KQYGK

SEQ ID NO: 5526 - protein, 5 aa, ARTIFICIAL SEQUENCE
  Synthetic Construct
KQYHK

SEQ ID NO: 5527 - protein, 5 aa, ARTIFICIAL SEQUENCE
  Synthetic Construct
KQYIK

SEQ ID NO: 5528 - protein, 5 aa, ARTIFICIAL SEQUENCE
  Synthetic Construct
KQYLK

SEQ ID NO: 5529 - protein, 5 aa, ARTIFICIAL SEQUENCE
  Synthetic Construct
KQYNK

SEQ ID NO: 5530 - protein, 5 aa, ARTIFICIAL SEQUENCE
  Synthetic Construct
KQYQK

SEQ ID NO: 5531 - protein, 5 aa, ARTIFICIAL SEQUENCE
  Synthetic Construct
KQYRK

SEQ ID NO: 5532 - protein, 5 aa, ARTIFICIAL SEQUENCE
  Synthetic Construct
KQYSK

SEQ ID NO: 5533 - protein, 5 aa, ARTIFICIAL SEQUENCE
  Synthetic Construct
KQYTK

SEQ ID NO: 5534 - protein, 5 aa, ARTIFICIAL SEQUENCE
  Synthetic Construct
KQYYK

SEQ ID NO: 5535 - protein, 5 aa, ARTIFICIAL SEQUENCE
  Synthetic Construct
KRAAK

SEQ ID NO: 5536 - protein, 5 aa, ARTIFICIAL SEQUENCE
  Synthetic Construct
KRADK

SEQ ID NO: 5537 - protein, 5 aa, ARTIFICIAL SEQUENCE
  Synthetic Construct
KRAEK

SEQ ID NO: 5538 - protein, 5 aa, ARTIFICIAL SEQUENCE
  Synthetic Construct
KRAFK

SEQ ID NO: 5539 - protein, 5 aa, ARTIFICIAL SEQUENCE
  Synthetic Construct
KRAGK

SEQ ID NO: 5540 - protein, 5 aa, ARTIFICIAL SEQUENCE
  Synthetic Construct
KRAHK

SEQ ID NO: 5541 - protein, 5 aa, ARTIFICIAL SEQUENCE
  Synthetic Construct
KRAIK

SEQ ID NO: 5542 - protein, 5 aa, ARTIFICIAL SEQUENCE
  Synthetic Construct
KRALK

SEQ ID NO: 5543 - protein, 5 aa, ARTIFICIAL SEQUENCE
  Synthetic Construct
KRANK

SEQ ID NO: 5544 - protein, 5 aa, ARTIFICIAL SEQUENCE
  Synthetic Construct
KRAQK

SEQ ID NO: 5545 - protein, 5 aa, ARTIFICIAL SEQUENCE
  Synthetic Construct
KRARK

SEQ ID NO: 5546 - protein, 5 aa, ARTIFICIAL SEQUENCE
  Synthetic Construct
KRASK

SEQ ID NO: 5547 - protein, 5 aa, ARTIFICIAL SEQUENCE
  Synthetic Construct
KRATK

SEQ ID NO: 5548 - protein, 5 aa, ARTIFICIAL SEQUENCE
  Synthetic Construct
KRAYK

SEQ ID NO: 5549 - protein, 5 aa, ARTIFICIAL SEQUENCE
  Synthetic Construct
KRDAK

SEQ ID NO: 5550 - protein, 5 aa, ARTIFICIAL SEQUENCE
  Synthetic Construct
KRDDK

SEQ ID NO: 5551 - protein, 5 aa, ARTIFICIAL SEQUENCE
  Synthetic Construct
KRDEK

SEQ ID NO: 5552 - protein, 5 aa, ARTIFICIAL SEQUENCE
  Synthetic Construct
KRDFK

SEQ ID NO: 5553 - protein, 5 aa, ARTIFICIAL SEQUENCE
  Synthetic Construct
KRDGK

SEQ ID NO: 5554 - protein, 5 aa, ARTIFICIAL SEQUENCE
  Synthetic Construct
KRDHK

SEQ ID NO: 5555 - protein, 5 aa, ARTIFICIAL SEQUENCE
  Synthetic Construct
KRDIK

SEQ ID NO: 5556 - protein, 5 aa, ARTIFICIAL SEQUENCE
  Synthetic Construct
KRDLK

SEQ ID NO: 5557 - protein, 5 aa, ARTIFICIAL SEQUENCE
  Synthetic Construct
KRDNK

SEQ ID NO: 5558 - protein, 5 aa, ARTIFICIAL SEQUENCE
  Synthetic Construct
KRDQK

SEQ ID NO: 5559 - protein, 5 aa, ARTIFICIAL SEQUENCE
  Synthetic Construct
KRDRK

SEQ ID NO: 5560 - protein, 5 aa, ARTIFICIAL SEQUENCE
  Synthetic Construct
KRDSK

SEQ ID NO: 5561 - protein, 5 aa, ARTIFICIAL SEQUENCE
  Synthetic Construct
KRDTK

SEQ ID NO: 5562 - protein, 5 aa, ARTIFICIAL SEQUENCE
  Synthetic Construct
KRDYK

SEQ ID NO: 5563 - protein, 5 aa, ARTIFICIAL SEQUENCE
  Synthetic Construct
KREAK

SEQ ID NO: 5564 - protein, 5 aa, ARTIFICIAL SEQUENCE
  Synthetic Construct
KREDK

SEQ ID NO: 5565 - protein, 5 aa, ARTIFICIAL SEQUENCE
  Synthetic Construct
KREEK

SEQ ID NO: 5566 - protein, 5 aa, ARTIFICIAL SEQUENCE
  Synthetic Construct
KREFK

SEQ ID NO: 5567 - protein, 5 aa, ARTIFICIAL SEQUENCE
  Synthetic Construct
KREGK

SEQ ID NO: 5568 - protein, 5 aa, ARTIFICIAL SEQUENCE
  Synthetic Construct
KREHK

SEQ ID NO: 5569 - protein, 5 aa, ARTIFICIAL SEQUENCE
  Synthetic Construct
KREIK

SEQ ID NO: 5570 - protein, 5 aa, ARTIFICIAL SEQUENCE
  Synthetic Construct
KRELK

SEQ ID NO: 5571 - protein, 5 aa, ARTIFICIAL SEQUENCE
  Synthetic Construct
KRENK

SEQ ID NO: 5572 - protein, 5 aa, ARTIFICIAL SEQUENCE
  Synthetic Construct
KREQK

SEQ ID NO: 5573 - protein, 5 aa, ARTIFICIAL SEQUENCE
  Synthetic Construct
KRERK

SEQ ID NO: 5574 - protein, 5 aa, ARTIFICIAL SEQUENCE
  Synthetic Construct
KRESK

SEQ ID NO: 5575 - protein, 5 aa, ARTIFICIAL SEQUENCE
  Synthetic Construct
KRETK

SEQ ID NO: 5576 - protein, 5 aa, ARTIFICIAL SEQUENCE
  Synthetic Construct
KREYK

SEQ ID NO: 5577 - protein, 5 aa, ARTIFICIAL SEQUENCE
  Synthetic Construct
KRFAK

SEQ ID NO: 5578 - protein, 5 aa, ARTIFICIAL SEQUENCE
  Synthetic Construct
KRFDK

SEQ ID NO: 5579 - protein, 5 aa, ARTIFICIAL SEQUENCE
  Synthetic Construct
KRFEK

SEQ ID NO: 5580 - protein, 5 aa, ARTIFICIAL SEQUENCE
  Synthetic Construct
KRFFK

SEQ ID NO: 5581 - protein, 5 aa, ARTIFICIAL SEQUENCE
  Synthetic Construct
KRFGK

SEQ ID NO: 5582 - protein, 5 aa, ARTIFICIAL SEQUENCE
  Synthetic Construct
KRFHK

SEQ ID NO: 5583 - protein, 5 aa, ARTIFICIAL SEQUENCE
  Synthetic Construct
KRFIK

SEQ ID NO: 5584 - protein, 5 aa, ARTIFICIAL SEQUENCE
  Synthetic Construct
KRFLK

SEQ ID NO: 5585 - protein, 5 aa, ARTIFICIAL SEQUENCE
  Synthetic Construct
KRFNK

SEQ ID NO: 5586 - protein, 5 aa, ARTIFICIAL SEQUENCE
  Synthetic Construct
KRFQK

SEQ ID NO: 5587 - protein, 5 aa, ARTIFICIAL SEQUENCE
  Synthetic Construct
KRFRK

SEQ ID NO: 5588 - protein, 5 aa, ARTIFICIAL SEQUENCE
  Synthetic Construct
KRFSK

SEQ ID NO: 5589 - protein, 5 aa, ARTIFICIAL SEQUENCE
  Synthetic Construct
KRFTK

SEQ ID NO: 5590 - protein, 5 aa, ARTIFICIAL SEQUENCE
  Synthetic Construct
KRFYK

SEQ ID NO: 5591 - protein, 5 aa, ARTIFICIAL SEQUENCE
  Synthetic Construct
KRGAK

SEQ ID NO: 5592 - protein, 5 aa, ARTIFICIAL SEQUENCE
  Synthetic Construct
KRGDK

SEQ ID NO: 5593 - protein, 5 aa, ARTIFICIAL SEQUENCE
  Synthetic Construct
KRGEK

SEQ ID NO: 5594 - protein, 5 aa, ARTIFICIAL SEQUENCE
  Synthetic Construct
KRGFK

SEQ ID NO: 5595 - protein, 5 aa, ARTIFICIAL SEQUENCE
  Synthetic Construct
KRGGK

SEQ ID NO: 5596 - protein, 5 aa, ARTIFICIAL SEQUENCE
  Synthetic Construct
KRGHK

SEQ ID NO: 5597 - protein, 5 aa, ARTIFICIAL SEQUENCE
  Synthetic Construct
KRGIK

SEQ ID NO: 5598 - protein, 5 aa, ARTIFICIAL SEQUENCE
  Synthetic Construct
KRGLK

SEQ ID NO: 5599 - protein, 5 aa, ARTIFICIAL SEQUENCE
  Synthetic Construct
KRGNK

SEQ ID NO: 5600 - protein, 5 aa, ARTIFICIAL SEQUENCE
  Synthetic Construct
KRGQK

SEQ ID NO: 5601 - protein, 5 aa, ARTIFICIAL SEQUENCE
  Synthetic Construct
KRGRK

SEQ ID NO: 5602 - protein, 5 aa, ARTIFICIAL SEQUENCE
  Synthetic Construct
KRGSK

SEQ ID NO: 5603 - protein, 5 aa, ARTIFICIAL SEQUENCE
  Synthetic Construct
KRGTK

SEQ ID NO: 5604 - protein, 5 aa, ARTIFICIAL SEQUENCE
  Synthetic Construct
KRGYK

SEQ ID NO: 5605 - protein, 5 aa, ARTIFICIAL SEQUENCE
  Synthetic Construct
KRHAK

SEQ ID NO: 5606 - protein, 5 aa, ARTIFICIAL SEQUENCE
  Synthetic Construct
KRHDK

SEQ ID NO: 5607 - protein, 5 aa, ARTIFICIAL SEQUENCE
  Synthetic Construct
KRHEK

SEQ ID NO: 5608 - protein, 5 aa, ARTIFICIAL SEQUENCE
  Synthetic Construct
KRHFK

SEQ ID NO: 5609 - protein, 5 aa, ARTIFICIAL SEQUENCE
  Synthetic Construct
KRHGK

SEQ ID NO: 5610 - protein, 5 aa, ARTIFICIAL SEQUENCE
  Synthetic Construct
KRHHK

SEQ ID NO: 5611 - protein, 5 aa, ARTIFICIAL SEQUENCE
  Synthetic Construct
KRHIK

SEQ ID NO: 5612 - protein, 5 aa, ARTIFICIAL SEQUENCE
  Synthetic Construct
KRHLK

SEQ ID NO: 5613 - protein, 5 aa, ARTIFICIAL SEQUENCE
  Synthetic Construct
KRHNK

SEQ ID NO: 5614 - protein, 5 aa, ARTIFICIAL SEQUENCE
  Synthetic Construct
KRHQK

SEQ ID NO: 5615 - protein, 5 aa, ARTIFICIAL SEQUENCE
  Synthetic Construct
KRHRK

SEQ ID NO: 5616 - protein, 5 aa, ARTIFICIAL SEQUENCE
  Synthetic Construct
KRHSK

SEQ ID NO: 5617 - protein, 5 aa, ARTIFICIAL SEQUENCE
  Synthetic Construct
KRHTK

SEQ ID NO: 5618 - protein, 5 aa, ARTIFICIAL SEQUENCE
  Synthetic Construct
KRHYK

SEQ ID NO: 5619 - protein, 5 aa, ARTIFICIAL SEQUENCE
  Synthetic Construct
KRIAK

SEQ ID NO: 5620 - protein, 5 aa, ARTIFICIAL SEQUENCE
  Synthetic Construct
KRIDK

SEQ ID NO: 5621 - protein, 5 aa, ARTIFICIAL SEQUENCE
  Synthetic Construct
KRIEK

SEQ ID NO: 5622 - protein, 5 aa, ARTIFICIAL SEQUENCE
  Synthetic Construct
KRIFK

SEQ ID NO: 5623 - protein, 5 aa, ARTIFICIAL SEQUENCE
  Synthetic Construct
KRIGK

SEQ ID NO: 5624 - protein, 5 aa, ARTIFICIAL SEQUENCE
  Synthetic Construct
KRIHK

SEQ ID NO: 5625 - protein, 5 aa, ARTIFICIAL SEQUENCE
  Synthetic Construct
KRIIK

SEQ ID NO: 5626 - protein, 5 aa, ARTIFICIAL SEQUENCE
  Synthetic Construct
KRILK

SEQ ID NO: 5627 - protein, 5 aa, ARTIFICIAL SEQUENCE
  Synthetic Construct
KRINK

SEQ ID NO: 5628 - protein, 5 aa, ARTIFICIAL SEQUENCE
  Synthetic Construct
KRIQK

SEQ ID NO: 5629 - protein, 5 aa, ARTIFICIAL SEQUENCE
  Synthetic Construct
KRIRK

SEQ ID NO: 5630 - protein, 5 aa, ARTIFICIAL SEQUENCE
  Synthetic Construct
KRISK

SEQ ID NO: 5631 - protein, 5 aa, ARTIFICIAL SEQUENCE
  Synthetic Construct
KRITK

SEQ ID NO: 5632 - protein, 5 aa, ARTIFICIAL SEQUENCE
  Synthetic Construct
KRIYK

SEQ ID NO: 5633 - protein, 5 aa, ARTIFICIAL SEQUENCE
  Synthetic Construct
KRLAK

SEQ ID NO: 5634 - protein, 5 aa, ARTIFICIAL SEQUENCE
  Synthetic Construct
KRLDK

SEQ ID NO: 5635 - protein, 5 aa, ARTIFICIAL SEQUENCE
  Synthetic Construct
KRLEK

SEQ ID NO: 5636 - protein, 5 aa, ARTIFICIAL SEQUENCE
  Synthetic Construct
KRLFK

SEQ ID NO: 5637 - protein, 5 aa, ARTIFICIAL SEQUENCE
  Synthetic Construct
KRLGK

SEQ ID NO: 5638 - protein, 5 aa, ARTIFICIAL SEQUENCE
  Synthetic Construct
KRLHK

SEQ ID NO: 5639 - protein, 5 aa, ARTIFICIAL SEQUENCE
  Synthetic Construct
KRLIK

SEQ ID NO: 5640 - protein, 5 aa, ARTIFICIAL SEQUENCE
  Synthetic Construct
KRLLK

SEQ ID NO: 5641 - protein, 5 aa, ARTIFICIAL SEQUENCE
  Synthetic Construct
KRLNK

SEQ ID NO: 5642 - protein, 5 aa, ARTIFICIAL SEQUENCE
  Synthetic Construct
KRLQK

SEQ ID NO: 5643 - protein, 5 aa, ARTIFICIAL SEQUENCE
  Synthetic Construct
KRLRK

SEQ ID NO: 5644 - protein, 5 aa, ARTIFICIAL SEQUENCE
  Synthetic Construct
KRLSK

SEQ ID NO: 5645 - protein, 5 aa, ARTIFICIAL SEQUENCE
  Synthetic Construct
KRLTK

SEQ ID NO: 5646 - protein, 5 aa, ARTIFICIAL SEQUENCE
  Synthetic Construct
KRLYK

SEQ ID NO: 5647 - protein, 5 aa, ARTIFICIAL SEQUENCE
  Synthetic Construct
KRNAK

SEQ ID NO: 5648 - protein, 5 aa, ARTIFICIAL SEQUENCE
  Synthetic Construct
KRNDK

SEQ ID NO: 5649 - protein, 5 aa, ARTIFICIAL SEQUENCE
  Synthetic Construct
KRNEK

SEQ ID NO: 5650 - protein, 5 aa, ARTIFICIAL SEQUENCE
  Synthetic Construct
KRNFK

SEQ ID NO: 5651 - protein, 5 aa, ARTIFICIAL SEQUENCE
  Synthetic Construct
KRNGK

SEQ ID NO: 5652 - protein, 5 aa, ARTIFICIAL SEQUENCE
  Synthetic Construct
KRNHK

SEQ ID NO: 5653 - protein, 5 aa, ARTIFICIAL SEQUENCE
  Synthetic Construct
KRNIK

SEQ ID NO: 5654 - protein, 5 aa, ARTIFICIAL SEQUENCE
  Synthetic Construct
KRNLK

SEQ ID NO: 5655 - protein, 5 aa, ARTIFICIAL SEQUENCE
  Synthetic Construct
KRNNK

SEQ ID NO: 5656 - protein, 5 aa, ARTIFICIAL SEQUENCE
  Synthetic Construct
KRNQK

SEQ ID NO: 5657 - protein, 5 aa, ARTIFICIAL SEQUENCE
  Synthetic Construct
KRNRK

SEQ ID NO: 5658 - protein, 5 aa, ARTIFICIAL SEQUENCE
  Synthetic Construct
KRNSK

SEQ ID NO: 5659 - protein, 5 aa, ARTIFICIAL SEQUENCE
  Synthetic Construct
KRNTK

SEQ ID NO: 5660 - protein, 5 aa, ARTIFICIAL SEQUENCE
  Synthetic Construct
KRNYK

SEQ ID NO: 5661 - protein, 5 aa, ARTIFICIAL SEQUENCE
  Synthetic Construct
KRPAK

SEQ ID NO: 5662 - protein, 5 aa, ARTIFICIAL SEQUENCE
  Synthetic Construct
KRPDK

SEQ ID NO: 5663 - protein, 5 aa, ARTIFICIAL SEQUENCE
  Synthetic Construct
KRPEK

SEQ ID NO: 5664 - protein, 5 aa, ARTIFICIAL SEQUENCE
  Synthetic Construct
KRPFK

SEQ ID NO: 5665 - protein, 5 aa, ARTIFICIAL SEQUENCE
  Synthetic Construct
KRPGK

SEQ ID NO: 5666 - protein, 5 aa, ARTIFICIAL SEQUENCE
  Synthetic Construct
KRPHK

SEQ ID NO: 5667 - protein, 5 aa, ARTIFICIAL SEQUENCE
  Synthetic Construct
KRPIK

SEQ ID NO: 5668 - protein, 5 aa, ARTIFICIAL SEQUENCE
  Synthetic Construct
KRPLK

SEQ ID NO: 5669 - protein, 5 aa, ARTIFICIAL SEQUENCE
  Synthetic Construct
KRPNK

SEQ ID NO: 5670 - protein, 5 aa, ARTIFICIAL SEQUENCE
  Synthetic Construct
KRPQK

SEQ ID NO: 5671 - protein, 5 aa, ARTIFICIAL SEQUENCE
  Synthetic Construct
KRPRK

SEQ ID NO: 5672 - protein, 5 aa, ARTIFICIAL SEQUENCE
  Synthetic Construct
KRPSK

SEQ ID NO: 5673 - protein, 5 aa, ARTIFICIAL SEQUENCE
  Synthetic Construct
KRPTK

SEQ ID NO: 5674 - protein, 5 aa, ARTIFICIAL SEQUENCE
  Synthetic Construct
KRPYK

SEQ ID NO: 5675 - protein, 5 aa, ARTIFICIAL SEQUENCE
  Synthetic Construct
KRQAK

SEQ ID NO: 5676 - protein, 5 aa, ARTIFICIAL SEQUENCE
  Synthetic Construct
KRQDK

SEQ ID NO: 5677 - protein, 5 aa, ARTIFICIAL SEQUENCE
  Synthetic Construct
KRQEK

SEQ ID NO: 5678 - protein, 5 aa, ARTIFICIAL SEQUENCE
  Synthetic Construct
KRQFK

SEQ ID NO: 5679 - protein, 5 aa, ARTIFICIAL SEQUENCE
  Synthetic Construct
KRQGK

SEQ ID NO: 5680 - protein, 5 aa, ARTIFICIAL SEQUENCE
  Synthetic Construct
KRQHK

SEQ ID NO: 5681 - protein, 5 aa, ARTIFICIAL SEQUENCE
  Synthetic Construct
KRQIK

SEQ ID NO: 5682 - protein, 5 aa, ARTIFICIAL SEQUENCE
  Synthetic Construct
KRQLK

SEQ ID NO: 5683 - protein, 5 aa, ARTIFICIAL SEQUENCE
  Synthetic Construct
KRQNK

SEQ ID NO: 5684 - protein, 5 aa, ARTIFICIAL SEQUENCE
  Synthetic Construct
KRQQK

SEQ ID NO: 5685 - protein, 5 aa, ARTIFICIAL SEQUENCE
  Synthetic Construct
KRQRK

SEQ ID NO: 5686 - protein, 5 aa, ARTIFICIAL SEQUENCE
  Synthetic Construct
KRQSK

SEQ ID NO: 5687 - protein, 5 aa, ARTIFICIAL SEQUENCE
  Synthetic Construct
KRQTK

SEQ ID NO: 5688 - protein, 5 aa, ARTIFICIAL SEQUENCE
  Synthetic Construct
KRQYK

SEQ ID NO: 5689 - protein, 5 aa, ARTIFICIAL SEQUENCE
  Synthetic Construct
KRRAK

SEQ ID NO: 5690 - protein, 5 aa, ARTIFICIAL SEQUENCE
  Synthetic Construct
KRRDK

SEQ ID NO: 5691 - protein, 5 aa, ARTIFICIAL SEQUENCE
  Synthetic Construct
KRREK

SEQ ID NO: 5692 - protein, 5 aa, ARTIFICIAL SEQUENCE
  Synthetic Construct
KRRFK

SEQ ID NO: 5693 - protein, 5 aa, ARTIFICIAL SEQUENCE
  Synthetic Construct
KRRGK

SEQ ID NO: 5694 - protein, 5 aa, ARTIFICIAL SEQUENCE
  Synthetic Construct
KRRHK

SEQ ID NO: 5695 - protein, 5 aa, ARTIFICIAL SEQUENCE
  Synthetic Construct
KRRIK

SEQ ID NO: 5696 - protein, 5 aa, ARTIFICIAL SEQUENCE
  Synthetic Construct
KRRLK

SEQ ID NO: 5697 - protein, 5 aa, ARTIFICIAL SEQUENCE
  Synthetic Construct
KRRNK

SEQ ID NO: 5698 - protein, 5 aa, ARTIFICIAL SEQUENCE
  Synthetic Construct
KRRQK

SEQ ID NO: 5699 - protein, 5 aa, ARTIFICIAL SEQUENCE
  Synthetic Construct
KRRRK

SEQ ID NO: 5700 - protein, 5 aa, ARTIFICIAL SEQUENCE
  Synthetic Construct
KRRSK

SEQ ID NO: 5701 - protein, 5 aa, ARTIFICIAL SEQUENCE
  Synthetic Construct
KRRTK

SEQ ID NO: 5702 - protein, 5 aa, ARTIFICIAL SEQUENCE
  Synthetic Construct
KRRYK

SEQ ID NO: 5703 - protein, 5 aa, ARTIFICIAL SEQUENCE
  Synthetic Construct
KRSAK

SEQ ID NO: 5704 - protein, 5 aa, ARTIFICIAL SEQUENCE
  Synthetic Construct
KRSDK

SEQ ID NO: 5705 - protein, 5 aa, ARTIFICIAL SEQUENCE
  Synthetic Construct
KRSEK

SEQ ID NO: 5706 - protein, 5 aa, ARTIFICIAL SEQUENCE
  Synthetic Construct
KRSFK

SEQ ID NO: 5707 - protein, 5 aa, ARTIFICIAL SEQUENCE
  Synthetic Construct
KRSGK

SEQ ID NO: 5708 - protein, 5 aa, ARTIFICIAL SEQUENCE
  Synthetic Construct
KRSHK

SEQ ID NO: 5709 - protein, 5 aa, ARTIFICIAL SEQUENCE
  Synthetic Construct
KRSIK

SEQ ID NO: 5710 - protein, 5 aa, ARTIFICIAL SEQUENCE
  Synthetic Construct
KRSLK

SEQ ID NO: 5711 - protein, 5 aa, ARTIFICIAL SEQUENCE
  Synthetic Construct
KRSNK

SEQ ID NO: 5712 - protein, 5 aa, ARTIFICIAL SEQUENCE
  Synthetic Construct
KRSQK

SEQ ID NO: 5713 - protein, 5 aa, ARTIFICIAL SEQUENCE
  Synthetic Construct
KRSRK

SEQ ID NO: 5714 - protein, 5 aa, ARTIFICIAL SEQUENCE
  Synthetic Construct
KRSSK

SEQ ID NO: 5715 - protein, 5 aa, ARTIFICIAL SEQUENCE
  Synthetic Construct
KRSTK

SEQ ID NO: 5716 - protein, 5 aa, ARTIFICIAL SEQUENCE
  Synthetic Construct
KRSYK

SEQ ID NO: 5717 - protein, 5 aa, ARTIFICIAL SEQUENCE
  Synthetic Construct
KRTAK

SEQ ID NO: 5718 - protein, 5 aa, ARTIFICIAL SEQUENCE
  Synthetic Construct
KRTDK

SEQ ID NO: 5719 - protein, 5 aa, ARTIFICIAL SEQUENCE
  Synthetic Construct
KRTEK

SEQ ID NO: 5720 - protein, 5 aa, ARTIFICIAL SEQUENCE
  Synthetic Construct
KRTFK

SEQ ID NO: 5721 - protein, 5 aa, ARTIFICIAL SEQUENCE
  Synthetic Construct
KRTGK

SEQ ID NO: 5722 - protein, 5 aa, ARTIFICIAL SEQUENCE
  Synthetic Construct
KRTHK

SEQ ID NO: 5723 - protein, 5 aa, ARTIFICIAL SEQUENCE
  Synthetic Construct
KRTIK

SEQ ID NO: 5724 - protein, 5 aa, ARTIFICIAL SEQUENCE
  Synthetic Construct
KRTLK

SEQ ID NO: 5725 - protein, 5 aa, ARTIFICIAL SEQUENCE
  Synthetic Construct
KRTNK

SEQ ID NO: 5726 - protein, 5 aa, ARTIFICIAL SEQUENCE
  Synthetic Construct
KRTQK

SEQ ID NO: 5727 - protein, 5 aa, ARTIFICIAL SEQUENCE
  Synthetic Construct
KRTRK

SEQ ID NO: 5728 - protein, 5 aa, ARTIFICIAL SEQUENCE
  Synthetic Construct
KRTSK

SEQ ID NO: 5729 - protein, 5 aa, ARTIFICIAL SEQUENCE
  Synthetic Construct
KRTTK

SEQ ID NO: 5730 - protein, 5 aa, ARTIFICIAL SEQUENCE
  Synthetic Construct
KRTYK

SEQ ID NO: 5731 - protein, 5 aa, ARTIFICIAL SEQUENCE
  Synthetic Construct
KRYAK

SEQ ID NO: 5732 - protein, 5 aa, ARTIFICIAL SEQUENCE
  Synthetic Construct
KRYDK

SEQ ID NO: 5733 - protein, 5 aa, ARTIFICIAL SEQUENCE
  Synthetic Construct
KRYEK

SEQ ID NO: 5734 - protein, 5 aa, ARTIFICIAL SEQUENCE
  Synthetic Construct
KRYFK

SEQ ID NO: 5735 - protein, 5 aa, ARTIFICIAL SEQUENCE
  Synthetic Construct
KRYGK

SEQ ID NO: 5736 - protein, 5 aa, ARTIFICIAL SEQUENCE
  Synthetic Construct
KRYHK

SEQ ID NO: 5737 - protein, 5 aa, ARTIFICIAL SEQUENCE
  Synthetic Construct
KRYIK

SEQ ID NO: 5738 - protein, 5 aa, ARTIFICIAL SEQUENCE
  Synthetic Construct
KRYLK

SEQ ID NO: 5739 - protein, 5 aa, ARTIFICIAL SEQUENCE
  Synthetic Construct
KRYNK

SEQ ID NO: 5740 - protein, 5 aa, ARTIFICIAL SEQUENCE
  Synthetic Construct
KRYQK

SEQ ID NO: 5741 - protein, 5 aa, ARTIFICIAL SEQUENCE
  Synthetic Construct
KRYRK

SEQ ID NO: 5742 - protein, 5 aa, ARTIFICIAL SEQUENCE
  Synthetic Construct
KRYSK

SEQ ID NO: 5743 - protein, 5 aa, ARTIFICIAL SEQUENCE
  Synthetic Construct
KRYTK

SEQ ID NO: 5744 - protein, 5 aa, ARTIFICIAL SEQUENCE
  Synthetic Construct
KRYYK

SEQ ID NO: 5745 - protein, 5 aa, ARTIFICIAL SEQUENCE
  Synthetic Construct
KSAAK

SEQ ID NO: 5746 - protein, 5 aa, ARTIFICIAL SEQUENCE
  Synthetic Construct
KSADK

SEQ ID NO: 5747 - protein, 5 aa, ARTIFICIAL SEQUENCE
  Synthetic Construct
KSAEK

SEQ ID NO: 5748 - protein, 5 aa, ARTIFICIAL SEQUENCE
  Synthetic Construct
KSAFK

SEQ ID NO: 5749 - protein, 5 aa, ARTIFICIAL SEQUENCE
  Synthetic Construct
KSAGK

SEQ ID NO: 5750 - protein, 5 aa, ARTIFICIAL SEQUENCE
  Synthetic Construct
KSAHK

SEQ ID NO: 5751 - protein, 5 aa, ARTIFICIAL SEQUENCE
  Synthetic Construct
KSAIK

SEQ ID NO: 5752 - protein, 5 aa, ARTIFICIAL SEQUENCE
  Synthetic Construct
KSALK

SEQ ID NO: 5753 - protein, 5 aa, ARTIFICIAL SEQUENCE
  Synthetic Construct
KSANK

SEQ ID NO: 5754 - protein, 5 aa, ARTIFICIAL SEQUENCE
  Synthetic Construct
KSAQK

SEQ ID NO: 5755 - protein, 5 aa, ARTIFICIAL SEQUENCE
  Synthetic Construct
KSARK

SEQ ID NO: 5756 - protein, 5 aa, ARTIFICIAL SEQUENCE
  Synthetic Construct
KSASK

SEQ ID NO: 5757 - protein, 5 aa, ARTIFICIAL SEQUENCE
  Synthetic Construct
KSATK

SEQ ID NO: 5758 - protein, 5 aa, ARTIFICIAL SEQUENCE
  Synthetic Construct
KSAYK

SEQ ID NO: 5759 - protein, 5 aa, ARTIFICIAL SEQUENCE
  Synthetic Construct
KSDAK

SEQ ID NO: 5760 - protein, 5 aa, ARTIFICIAL SEQUENCE
  Synthetic Construct
KSDDK

SEQ ID NO: 5761 - protein, 5 aa, ARTIFICIAL SEQUENCE
  Synthetic Construct
KSDEK

SEQ ID NO: 5762 - protein, 5 aa, ARTIFICIAL SEQUENCE
  Synthetic Construct
KSDFK

SEQ ID NO: 5763 - protein, 5 aa, ARTIFICIAL SEQUENCE
  Synthetic Construct
KSDGK

SEQ ID NO: 5764 - protein, 5 aa, ARTIFICIAL SEQUENCE
  Synthetic Construct
KSDHK

SEQ ID NO: 5765 - protein, 5 aa, ARTIFICIAL SEQUENCE
  Synthetic Construct
KSDIK

SEQ ID NO: 5766 - protein, 5 aa, ARTIFICIAL SEQUENCE
  Synthetic Construct
KSDLK

SEQ ID NO: 5767 - protein, 5 aa, ARTIFICIAL SEQUENCE
  Synthetic Construct
KSDNK

SEQ ID NO: 5768 - protein, 5 aa, ARTIFICIAL SEQUENCE
  Synthetic Construct
KSDQK

SEQ ID NO: 5769 - protein, 5 aa, ARTIFICIAL SEQUENCE
  Synthetic Construct
KSDRK

SEQ ID NO: 5770 - protein, 5 aa, ARTIFICIAL SEQUENCE
  Synthetic Construct
KSDSK

SEQ ID NO: 5771 - protein, 5 aa, ARTIFICIAL SEQUENCE
  Synthetic Construct
KSDTK

SEQ ID NO: 5772 - protein, 5 aa, ARTIFICIAL SEQUENCE
  Synthetic Construct
KSDYK

SEQ ID NO: 5773 - protein, 5 aa, ARTIFICIAL SEQUENCE
  Synthetic Construct
KSEAK

SEQ ID NO: 5774 - protein, 5 aa, ARTIFICIAL SEQUENCE
  Synthetic Construct
KSEDK

SEQ ID NO: 5775 - protein, 5 aa, ARTIFICIAL SEQUENCE
  Synthetic Construct
KSEEK

SEQ ID NO: 5776 - protein, 5 aa, ARTIFICIAL SEQUENCE
  Synthetic Construct
KSEFK

SEQ ID NO: 5777 - protein, 5 aa, ARTIFICIAL SEQUENCE
  Synthetic Construct
KSEGK

SEQ ID NO: 5778 - protein, 5 aa, ARTIFICIAL SEQUENCE
  Synthetic Construct
KSEHK

SEQ ID NO: 5779 - protein, 5 aa, ARTIFICIAL SEQUENCE
  Synthetic Construct
KSEIK

SEQ ID NO: 5780 - protein, 5 aa, ARTIFICIAL SEQUENCE
  Synthetic Construct
KSELK

SEQ ID NO: 5781 - protein, 5 aa, ARTIFICIAL SEQUENCE
  Synthetic Construct
KSENK

SEQ ID NO: 5782 - protein, 5 aa, ARTIFICIAL SEQUENCE
  Synthetic Construct
KSEQK

SEQ ID NO: 5783 - protein, 5 aa, ARTIFICIAL SEQUENCE
  Synthetic Construct
KSERK

SEQ ID NO: 5784 - protein, 5 aa, ARTIFICIAL SEQUENCE
  Synthetic Construct
KSESK

SEQ ID NO: 5785 - protein, 5 aa, ARTIFICIAL SEQUENCE
  Synthetic Construct
KSETK

SEQ ID NO: 5786 - protein, 5 aa, ARTIFICIAL SEQUENCE
  Synthetic Construct
KSEYK

SEQ ID NO: 5787 - protein, 5 aa, ARTIFICIAL SEQUENCE
  Synthetic Construct
KSFAK

SEQ ID NO: 5788 - protein, 5 aa, ARTIFICIAL SEQUENCE
  Synthetic Construct
KSFDK

SEQ ID NO: 5789 - protein, 5 aa, ARTIFICIAL SEQUENCE
  Synthetic Construct
KSFEK

SEQ ID NO: 5790 - protein, 5 aa, ARTIFICIAL SEQUENCE
  Synthetic Construct
KSFFK

SEQ ID NO: 5791 - protein, 5 aa, ARTIFICIAL SEQUENCE
  Synthetic Construct
KSFGK

SEQ ID NO: 5792 - protein, 5 aa, ARTIFICIAL SEQUENCE
  Synthetic Construct
KSFHK

SEQ ID NO: 5793 - protein, 5 aa, ARTIFICIAL SEQUENCE
  Synthetic Construct
KSFIK

SEQ ID NO: 5794 - protein, 5 aa, ARTIFICIAL SEQUENCE
  Synthetic Construct
KSFLK

SEQ ID NO: 5795 - protein, 5 aa, ARTIFICIAL SEQUENCE
  Synthetic Construct
KSFNK

SEQ ID NO: 5796 - protein, 5 aa, ARTIFICIAL SEQUENCE
  Synthetic Construct
KSFQK

SEQ ID NO: 5797 - protein, 5 aa, ARTIFICIAL SEQUENCE
  Synthetic Construct
KSFRK

SEQ ID NO: 5798 - protein, 5 aa, ARTIFICIAL SEQUENCE
  Synthetic Construct
KSFSK

SEQ ID NO: 5799 - protein, 5 aa, ARTIFICIAL SEQUENCE
  Synthetic Construct
KSFTK

SEQ ID NO: 5800 - protein, 5 aa, ARTIFICIAL SEQUENCE
  Synthetic Construct
KSFYK

SEQ ID NO: 5801 - protein, 5 aa, ARTIFICIAL SEQUENCE
  Synthetic Construct
KSGAK

SEQ ID NO: 5802 - protein, 5 aa, ARTIFICIAL SEQUENCE
  Synthetic Construct
KSGDK

SEQ ID NO: 5803 - protein, 5 aa, ARTIFICIAL SEQUENCE
  Synthetic Construct
KSGEK

SEQ ID NO: 5804 - protein, 5 aa, ARTIFICIAL SEQUENCE
  Synthetic Construct
KSGFK

SEQ ID NO: 5805 - protein, 5 aa, ARTIFICIAL SEQUENCE
  Synthetic Construct
KSGGK

SEQ ID NO: 5806 - protein, 5 aa, ARTIFICIAL SEQUENCE
  Synthetic Construct
KSGHK

SEQ ID NO: 5807 - protein, 5 aa, ARTIFICIAL SEQUENCE
  Synthetic Construct
KSGIK

SEQ ID NO: 5808 - protein, 5 aa, ARTIFICIAL SEQUENCE
  Synthetic Construct
KSGLK

SEQ ID NO: 5809 - protein, 5 aa, ARTIFICIAL SEQUENCE
  Synthetic Construct
KSGNK

SEQ ID NO: 5810 - protein, 5 aa, ARTIFICIAL SEQUENCE
  Synthetic Construct
KSGQK

SEQ ID NO: 5811 - protein, 5 aa, ARTIFICIAL SEQUENCE
  Synthetic Construct
KSGRK

SEQ ID NO: 5812 - protein, 5 aa, ARTIFICIAL SEQUENCE
  Synthetic Construct
KSGSK

SEQ ID NO: 5813 - protein, 5 aa, ARTIFICIAL SEQUENCE
  Synthetic Construct
KSGTK

SEQ ID NO: 5814 - protein, 5 aa, ARTIFICIAL SEQUENCE
  Synthetic Construct
KSGYK

SEQ ID NO: 5815 - protein, 5 aa, ARTIFICIAL SEQUENCE
  Synthetic Construct
KSHAK

SEQ ID NO: 5816 - protein, 5 aa, ARTIFICIAL SEQUENCE
  Synthetic Construct
KSHDK

SEQ ID NO: 5817 - protein, 5 aa, ARTIFICIAL SEQUENCE
  Synthetic Construct
KSHEK

SEQ ID NO: 5818 - protein, 5 aa, ARTIFICIAL SEQUENCE
  Synthetic Construct
KSHFK

SEQ ID NO: 5819 - protein, 5 aa, ARTIFICIAL SEQUENCE
  Synthetic Construct
KSHGK

SEQ ID NO: 5820 - protein, 5 aa, ARTIFICIAL SEQUENCE
  Synthetic Construct
KSHHK

SEQ ID NO: 5821 - protein, 5 aa, ARTIFICIAL SEQUENCE
  Synthetic Construct
KSHIK

SEQ ID NO: 5822 - protein, 5 aa, ARTIFICIAL SEQUENCE
  Synthetic Construct
KSHLK

SEQ ID NO: 5823 - protein, 5 aa, ARTIFICIAL SEQUENCE
  Synthetic Construct
KSHNK

SEQ ID NO: 5824 - protein, 5 aa, ARTIFICIAL SEQUENCE
  Synthetic Construct
KSHQK

SEQ ID NO: 5825 - protein, 5 aa, ARTIFICIAL SEQUENCE
  Synthetic Construct
KSHRK

SEQ ID NO: 5826 - protein, 5 aa, ARTIFICIAL SEQUENCE
  Synthetic Construct
KSHSK

SEQ ID NO: 5827 - protein, 5 aa, ARTIFICIAL SEQUENCE
  Synthetic Construct
KSHTK

SEQ ID NO: 5828 - protein, 5 aa, ARTIFICIAL SEQUENCE
  Synthetic Construct
KSHYK

SEQ ID NO: 5829 - protein, 5 aa, ARTIFICIAL SEQUENCE
  Synthetic Construct
KSIAK

SEQ ID NO: 5830 - protein, 5 aa, ARTIFICIAL SEQUENCE
  Synthetic Construct
KSIDK

SEQ ID NO: 5831 - protein, 5 aa, ARTIFICIAL SEQUENCE
  Synthetic Construct
KSIEK

SEQ ID NO: 5832 - protein, 5 aa, ARTIFICIAL SEQUENCE
  Synthetic Construct
KSIFK

SEQ ID NO: 5833 - protein, 5 aa, ARTIFICIAL SEQUENCE
  Synthetic Construct
KSIGK

SEQ ID NO: 5834 - protein, 5 aa, ARTIFICIAL SEQUENCE
  Synthetic Construct
KSIHK

SEQ ID NO: 5835 - protein, 5 aa, ARTIFICIAL SEQUENCE
  Synthetic Construct
KSIIK

SEQ ID NO: 5836 - protein, 5 aa, ARTIFICIAL SEQUENCE
  Synthetic Construct
KSILK

SEQ ID NO: 5837 - protein, 5 aa, ARTIFICIAL SEQUENCE
  Synthetic Construct
KSINK

SEQ ID NO: 5838 - protein, 5 aa, ARTIFICIAL SEQUENCE
  Synthetic Construct
KSIQK

SEQ ID NO: 5839 - protein, 5 aa, ARTIFICIAL SEQUENCE
  Synthetic Construct
KSIRK

SEQ ID NO: 5840 - protein, 5 aa, ARTIFICIAL SEQUENCE
  Synthetic Construct
KSISK

SEQ ID NO: 5841 - protein, 5 aa, ARTIFICIAL SEQUENCE
  Synthetic Construct
KSITK

SEQ ID NO: 5842 - protein, 5 aa, ARTIFICIAL SEQUENCE
  Synthetic Construct
KSIYK

SEQ ID NO: 5843 - protein, 5 aa, ARTIFICIAL SEQUENCE
  Synthetic Construct
KSLAK

SEQ ID NO: 5844 - protein, 5 aa, ARTIFICIAL SEQUENCE
  Synthetic Construct
KSLDK

SEQ ID NO: 5845 - protein, 5 aa, ARTIFICIAL SEQUENCE
  Synthetic Construct
KSLEK

SEQ ID NO: 5846 - protein, 5 aa, ARTIFICIAL SEQUENCE
  Synthetic Construct
KSLFK

SEQ ID NO: 5847 - protein, 5 aa, ARTIFICIAL SEQUENCE
  Synthetic Construct
KSLGK

SEQ ID NO: 5848 - protein, 5 aa, ARTIFICIAL SEQUENCE
  Synthetic Construct
KSLHK

SEQ ID NO: 5849 - protein, 5 aa, ARTIFICIAL SEQUENCE
  Synthetic Construct
KSLIK

SEQ ID NO: 5850 - protein, 5 aa, ARTIFICIAL SEQUENCE
  Synthetic Construct
KSLLK

SEQ ID NO: 5851 - protein, 5 aa, ARTIFICIAL SEQUENCE
  Synthetic Construct
KSLNK

SEQ ID NO: 5852 - protein, 5 aa, ARTIFICIAL SEQUENCE
  Synthetic Construct
KSLQK

SEQ ID NO: 5853 - protein, 5 aa, ARTIFICIAL SEQUENCE
  Synthetic Construct
KSLRK

SEQ ID NO: 5854 - protein, 5 aa, ARTIFICIAL SEQUENCE
  Synthetic Construct
KSLSK

SEQ ID NO: 5855 - protein, 5 aa, ARTIFICIAL SEQUENCE
  Synthetic Construct
KSLTK

SEQ ID NO: 5856 - protein, 5 aa, ARTIFICIAL SEQUENCE
  Synthetic Construct
KSLYK

SEQ ID NO: 5857 - protein, 5 aa, ARTIFICIAL SEQUENCE
  Synthetic Construct
KSNAK

SEQ ID NO: 5858 - protein, 5 aa, ARTIFICIAL SEQUENCE
  Synthetic Construct
KSNDK

SEQ ID NO: 5859 - protein, 5 aa, ARTIFICIAL SEQUENCE
  Synthetic Construct
KSNEK

SEQ ID NO: 5860 - protein, 5 aa, ARTIFICIAL SEQUENCE
  Synthetic Construct
KSNFK

SEQ ID NO: 5861 - protein, 5 aa, ARTIFICIAL SEQUENCE
  Synthetic Construct
KSNGK

SEQ ID NO: 5862 - protein, 5 aa, ARTIFICIAL SEQUENCE
  Synthetic Construct
KSNHK

SEQ ID NO: 5863 - protein, 5 aa, ARTIFICIAL SEQUENCE
  Synthetic Construct
KSNIK

SEQ ID NO: 5864 - protein, 5 aa, ARTIFICIAL SEQUENCE
  Synthetic Construct
KSNLK

SEQ ID NO: 5865 - protein, 5 aa, ARTIFICIAL SEQUENCE
  Synthetic Construct
KSNNK

SEQ ID NO: 5866 - protein, 5 aa, ARTIFICIAL SEQUENCE
  Synthetic Construct
KSNQK

SEQ ID NO: 5867 - protein, 5 aa, ARTIFICIAL SEQUENCE
  Synthetic Construct
KSNRK

SEQ ID NO: 5868 - protein, 5 aa, ARTIFICIAL SEQUENCE
  Synthetic Construct
KSNSK

SEQ ID NO: 5869 - protein, 5 aa, ARTIFICIAL SEQUENCE
  Synthetic Construct
KSNTK

SEQ ID NO: 5870 - protein, 5 aa, ARTIFICIAL SEQUENCE
  Synthetic Construct
KSNYK

SEQ ID NO: 5871 - protein, 5 aa, ARTIFICIAL SEQUENCE
  Synthetic Construct
KSPAK

SEQ ID NO: 5872 - protein, 5 aa, ARTIFICIAL SEQUENCE
  Synthetic Construct
KSPDK

SEQ ID NO: 5873 - protein, 5 aa, ARTIFICIAL SEQUENCE
  Synthetic Construct
KSPEK

SEQ ID NO: 5874 - protein, 5 aa, ARTIFICIAL SEQUENCE
  Synthetic Construct
KSPFK

SEQ ID NO: 5875 - protein, 5 aa, ARTIFICIAL SEQUENCE
  Synthetic Construct
KSPGK

SEQ ID NO: 5876 - protein, 5 aa, ARTIFICIAL SEQUENCE
  Synthetic Construct
KSPHK

SEQ ID NO: 5877 - protein, 5 aa, ARTIFICIAL SEQUENCE
  Synthetic Construct
KSPIK

SEQ ID NO: 5878 - protein, 5 aa, ARTIFICIAL SEQUENCE
  Synthetic Construct
KSPLK

SEQ ID NO: 5879 - protein, 5 aa, ARTIFICIAL SEQUENCE
  Synthetic Construct
KSPNK

SEQ ID NO: 5880 - protein, 5 aa, ARTIFICIAL SEQUENCE
  Synthetic Construct
KSPQK

SEQ ID NO: 5881 - protein, 5 aa, ARTIFICIAL SEQUENCE
  Synthetic Construct
KSPRK

SEQ ID NO: 5882 - protein, 5 aa, ARTIFICIAL SEQUENCE
  Synthetic Construct
KSPSK

SEQ ID NO: 5883 - protein, 5 aa, ARTIFICIAL SEQUENCE
  Synthetic Construct
KSPTK

SEQ ID NO: 5884 - protein, 5 aa, ARTIFICIAL SEQUENCE
  Synthetic Construct
KSPYK

SEQ ID NO: 5885 - protein, 5 aa, ARTIFICIAL SEQUENCE
  Synthetic Construct
KSQAK

SEQ ID NO: 5886 - protein, 5 aa, ARTIFICIAL SEQUENCE
  Synthetic Construct
KSQDK

SEQ ID NO: 5887 - protein, 5 aa, ARTIFICIAL SEQUENCE
  Synthetic Construct
KSQEK

SEQ ID NO: 5888 - protein, 5 aa, ARTIFICIAL SEQUENCE
  Synthetic Construct
KSQFK

SEQ ID NO: 5889 - protein, 5 aa, ARTIFICIAL SEQUENCE
  Synthetic Construct
KSQGK

SEQ ID NO: 5890 - protein, 5 aa, ARTIFICIAL SEQUENCE
  Synthetic Construct
KSQHK

SEQ ID NO: 5891 - protein, 5 aa, ARTIFICIAL SEQUENCE
  Synthetic Construct
KSQIK

SEQ ID NO: 5892 - protein, 5 aa, ARTIFICIAL SEQUENCE
  Synthetic Construct
KSQLK

SEQ ID NO: 5893 - protein, 5 aa, ARTIFICIAL SEQUENCE
  Synthetic Construct
KSQNK

SEQ ID NO: 5894 - protein, 5 aa, ARTIFICIAL SEQUENCE
  Synthetic Construct
KSQQK

SEQ ID NO: 5895 - protein, 5 aa, ARTIFICIAL SEQUENCE
  Synthetic Construct
KSQRK

SEQ ID NO: 5896 - protein, 5 aa, ARTIFICIAL SEQUENCE
  Synthetic Construct
KSQSK

SEQ ID NO: 5897 - protein, 5 aa, ARTIFICIAL SEQUENCE
  Synthetic Construct
KSQTK

SEQ ID NO: 5898 - protein, 5 aa, ARTIFICIAL SEQUENCE
  Synthetic Construct
KSQYK

SEQ ID NO: 5899 - protein, 5 aa, ARTIFICIAL SEQUENCE
  Synthetic Construct
KSRAK

SEQ ID NO: 5900 - protein, 5 aa, ARTIFICIAL SEQUENCE
  Synthetic Construct
KSRDK

SEQ ID NO: 5901 - protein, 5 aa, ARTIFICIAL SEQUENCE
  Synthetic Construct
KSREK

SEQ ID NO: 5902 - protein, 5 aa, ARTIFICIAL SEQUENCE
  Synthetic Construct
KSRFK

SEQ ID NO: 5903 - protein, 5 aa, ARTIFICIAL SEQUENCE
  Synthetic Construct
KSRGK

SEQ ID NO: 5904 - protein, 5 aa, ARTIFICIAL SEQUENCE
  Synthetic Construct
KSRHK

SEQ ID NO: 5905 - protein, 5 aa, ARTIFICIAL SEQUENCE
  Synthetic Construct
KSRIK

SEQ ID NO: 5906 - protein, 5 aa, ARTIFICIAL SEQUENCE
  Synthetic Construct
KSRLK

SEQ ID NO: 5907 - protein, 5 aa, ARTIFICIAL SEQUENCE
  Synthetic Construct
KSRNK

SEQ ID NO: 5908 - protein, 5 aa, ARTIFICIAL SEQUENCE
  Synthetic Construct
KSRQK

SEQ ID NO: 5909 - protein, 5 aa, ARTIFICIAL SEQUENCE
  Synthetic Construct
KSRRK

SEQ ID NO: 5910 - protein, 5 aa, ARTIFICIAL SEQUENCE
  Synthetic Construct
KSRSK

SEQ ID NO: 5911 - protein, 5 aa, ARTIFICIAL SEQUENCE
  Synthetic Construct
KSRTK

SEQ ID NO: 5912 - protein, 5 aa, ARTIFICIAL SEQUENCE
  Synthetic Construct
KSRYK

SEQ ID NO: 5913 - protein, 5 aa, ARTIFICIAL SEQUENCE
  Synthetic Construct
KSSAK

SEQ ID NO: 5914 - protein, 5 aa, ARTIFICIAL SEQUENCE
  Synthetic Construct
KSSDK

SEQ ID NO: 5915 - protein, 5 aa, ARTIFICIAL SEQUENCE
  Synthetic Construct
KSSEK

SEQ ID NO: 5916 - protein, 5 aa, ARTIFICIAL SEQUENCE
  Synthetic Construct
KSSFK

SEQ ID NO: 5917 - protein, 5 aa, ARTIFICIAL SEQUENCE
  Synthetic Construct
KSSGK

SEQ ID NO: 5918 - protein, 5 aa, ARTIFICIAL SEQUENCE
  Synthetic Construct
KSSHK

SEQ ID NO: 5919 - protein, 5 aa, ARTIFICIAL SEQUENCE
  Synthetic Construct
KSSIK

SEQ ID NO: 5920 - protein, 5 aa, ARTIFICIAL SEQUENCE
  Synthetic Construct
KSSLK

SEQ ID NO: 5921 - protein, 5 aa, ARTIFICIAL SEQUENCE
  Synthetic Construct
KSSNK

SEQ ID NO: 5922 - protein, 5 aa, ARTIFICIAL SEQUENCE
  Synthetic Construct
KSSQK

SEQ ID NO: 5923 - protein, 5 aa, ARTIFICIAL SEQUENCE
  Synthetic Construct
KSSRK

SEQ ID NO: 5924 - protein, 5 aa, ARTIFICIAL SEQUENCE
  Synthetic Construct
KSSSK

SEQ ID NO: 5925 - protein, 5 aa, ARTIFICIAL SEQUENCE
  Synthetic Construct
KSSTK

SEQ ID NO: 5926 - protein, 5 aa, ARTIFICIAL SEQUENCE
  Synthetic Construct
KSSYK

SEQ ID NO: 5927 - protein, 5 aa, ARTIFICIAL SEQUENCE
  Synthetic Construct
KSTAK

SEQ ID NO: 5928 - protein, 5 aa, ARTIFICIAL SEQUENCE
  Synthetic Construct
KSTDK

SEQ ID NO: 5929 - protein, 5 aa, ARTIFICIAL SEQUENCE
  Synthetic Construct
KSTEK

SEQ ID NO: 5930 - protein, 5 aa, ARTIFICIAL SEQUENCE
  Synthetic Construct
KSTFK

SEQ ID NO: 5931 - protein, 5 aa, ARTIFICIAL SEQUENCE
  Synthetic Construct
KSTGK

SEQ ID NO: 5932 - protein, 5 aa, ARTIFICIAL SEQUENCE
  Synthetic Construct
KSTHK

SEQ ID NO: 5933 - protein, 5 aa, ARTIFICIAL SEQUENCE
  Synthetic Construct
KSTIK

SEQ ID NO: 5934 - protein, 5 aa, ARTIFICIAL SEQUENCE
  Synthetic Construct
KSTLK

SEQ ID NO: 5935 - protein, 5 aa, ARTIFICIAL SEQUENCE
  Synthetic Construct
KSTNK

SEQ ID NO: 5936 - protein, 5 aa, ARTIFICIAL SEQUENCE
  Synthetic Construct
KSTQK

SEQ ID NO: 5937 - protein, 5 aa, ARTIFICIAL SEQUENCE
  Synthetic Construct
KSTRK

SEQ ID NO: 5938 - protein, 5 aa, ARTIFICIAL SEQUENCE
  Synthetic Construct
KSTSK

SEQ ID NO: 5939 - protein, 5 aa, ARTIFICIAL SEQUENCE
  Synthetic Construct
KSTTK

SEQ ID NO: 5940 - protein, 5 aa, ARTIFICIAL SEQUENCE
  Synthetic Construct
KSTYK

SEQ ID NO: 5941 - protein, 5 aa, ARTIFICIAL SEQUENCE
  Synthetic Construct
KSYAK

SEQ ID NO: 5942 - protein, 5 aa, ARTIFICIAL SEQUENCE
  Synthetic Construct
KSYDK

SEQ ID NO: 5943 - protein, 5 aa, ARTIFICIAL SEQUENCE
  Synthetic Construct
KSYEK

SEQ ID NO: 5944 - protein, 5 aa, ARTIFICIAL SEQUENCE
  Synthetic Construct
KSYFK

SEQ ID NO: 5945 - protein, 5 aa, ARTIFICIAL SEQUENCE
  Synthetic Construct
KSYGK

SEQ ID NO: 5946 - protein, 5 aa, ARTIFICIAL SEQUENCE
  Synthetic Construct
KSYHK

SEQ ID NO: 5947 - protein, 5 aa, ARTIFICIAL SEQUENCE
  Synthetic Construct
KSYIK

SEQ ID NO: 5948 - protein, 5 aa, ARTIFICIAL SEQUENCE
  Synthetic Construct
KSYLK

SEQ ID NO: 5949 - protein, 5 aa, ARTIFICIAL SEQUENCE
  Synthetic Construct
KSYNK

SEQ ID NO: 5950 - protein, 5 aa, ARTIFICIAL SEQUENCE
  Synthetic Construct
KSYQK

SEQ ID NO: 5951 - protein, 5 aa, ARTIFICIAL SEQUENCE
  Synthetic Construct
KSYRK

SEQ ID NO: 5952 - protein, 5 aa, ARTIFICIAL SEQUENCE
  Synthetic Construct
KSYSK

SEQ ID NO: 5953 - protein, 5 aa, ARTIFICIAL SEQUENCE
  Synthetic Construct
KSYTK

SEQ ID NO: 5954 - protein, 5 aa, ARTIFICIAL SEQUENCE
  Synthetic Construct
KSYYK

SEQ ID NO: 5955 - protein, 5 aa, ARTIFICIAL SEQUENCE
  Synthetic Construct
KTAAK

SEQ ID NO: 5956 - protein, 5 aa, ARTIFICIAL SEQUENCE
  Synthetic Construct
KTADK

SEQ ID NO: 5957 - protein, 5 aa, ARTIFICIAL SEQUENCE
  Synthetic Construct
KTAEK

SEQ ID NO: 5958 - protein, 5 aa, ARTIFICIAL SEQUENCE
  Synthetic Construct
KTAFK

SEQ ID NO: 5959 - protein, 5 aa, ARTIFICIAL SEQUENCE
  Synthetic Construct
KTAGK

SEQ ID NO: 5960 - protein, 5 aa, ARTIFICIAL SEQUENCE
  Synthetic Construct
KTAHK

SEQ ID NO: 5961 - protein, 5 aa, ARTIFICIAL SEQUENCE
  Synthetic Construct
KTAIK

SEQ ID NO: 5962 - protein, 5 aa, ARTIFICIAL SEQUENCE
  Synthetic Construct
KTALK

SEQ ID NO: 5963 - protein, 5 aa, ARTIFICIAL SEQUENCE
  Synthetic Construct
KTANK

SEQ ID NO: 5964 - protein, 5 aa, ARTIFICIAL SEQUENCE
  Synthetic Construct
KTAQK

SEQ ID NO: 5965 - protein, 5 aa, ARTIFICIAL SEQUENCE
  Synthetic Construct
KTARK

SEQ ID NO: 5966 - protein, 5 aa, ARTIFICIAL SEQUENCE
  Synthetic Construct
KTASK

SEQ ID NO: 5967 - protein, 5 aa, ARTIFICIAL SEQUENCE
  Synthetic Construct
KTATK

SEQ ID NO: 5968 - protein, 5 aa, ARTIFICIAL SEQUENCE
  Synthetic Construct
KTAYK

SEQ ID NO: 5969 - protein, 5 aa, ARTIFICIAL SEQUENCE
  Synthetic Construct
KTDAK

SEQ ID NO: 5970 - protein, 5 aa, ARTIFICIAL SEQUENCE
  Synthetic Construct
KTDDK

SEQ ID NO: 5971 - protein, 5 aa, ARTIFICIAL SEQUENCE
  Synthetic Construct
KTDEK

SEQ ID NO: 5972 - protein, 5 aa, ARTIFICIAL SEQUENCE
  Synthetic Construct
KTDFK

SEQ ID NO: 5973 - protein, 5 aa, ARTIFICIAL SEQUENCE
  Synthetic Construct
KTDGK

SEQ ID NO: 5974 - protein, 5 aa, ARTIFICIAL SEQUENCE
  Synthetic Construct
KTDHK

SEQ ID NO: 5975 - protein, 5 aa, ARTIFICIAL SEQUENCE
  Synthetic Construct
KTDIK

SEQ ID NO: 5976 - protein, 5 aa, ARTIFICIAL SEQUENCE
  Synthetic Construct
KTDLK

SEQ ID NO: 5977 - protein, 5 aa, ARTIFICIAL SEQUENCE
  Synthetic Construct
KTDNK

SEQ ID NO: 5978 - protein, 5 aa, ARTIFICIAL SEQUENCE
  Synthetic Construct
KTDQK

SEQ ID NO: 5979 - protein, 5 aa, ARTIFICIAL SEQUENCE
  Synthetic Construct
KTDRK

SEQ ID NO: 5980 - protein, 5 aa, ARTIFICIAL SEQUENCE
  Synthetic Construct
KTDSK

SEQ ID NO: 5981 - protein, 5 aa, ARTIFICIAL SEQUENCE
  Synthetic Construct
KTDTK

SEQ ID NO: 5982 - protein, 5 aa, ARTIFICIAL SEQUENCE
  Synthetic Construct
KTDYK

SEQ ID NO: 5983 - protein, 5 aa, ARTIFICIAL SEQUENCE
  Synthetic Construct
KTEAK

SEQ ID NO: 5984 - protein, 5 aa, ARTIFICIAL SEQUENCE
  Synthetic Construct
KTEDK

SEQ ID NO: 5985 - protein, 5 aa, ARTIFICIAL SEQUENCE
  Synthetic Construct
KTEEK

SEQ ID NO: 5986 - protein, 5 aa, ARTIFICIAL SEQUENCE
  Synthetic Construct
KTEFK

SEQ ID NO: 5987 - protein, 5 aa, ARTIFICIAL SEQUENCE
  Synthetic Construct
KTEGK

SEQ ID NO: 5988 - protein, 5 aa, ARTIFICIAL SEQUENCE
  Synthetic Construct
KTEHK

SEQ ID NO: 5989 - protein, 5 aa, ARTIFICIAL SEQUENCE
  Synthetic Construct
KTEIK

SEQ ID NO: 5990 - protein, 5 aa, ARTIFICIAL SEQUENCE
  Synthetic Construct
KTELK

SEQ ID NO: 5991 - protein, 5 aa, ARTIFICIAL SEQUENCE
  Synthetic Construct
KTENK

SEQ ID NO: 5992 - protein, 5 aa, ARTIFICIAL SEQUENCE
  Synthetic Construct
KTEQK

SEQ ID NO: 5993 - protein, 5 aa, ARTIFICIAL SEQUENCE
  Synthetic Construct
KTERK

SEQ ID NO: 5994 - protein, 5 aa, ARTIFICIAL SEQUENCE
  Synthetic Construct
KTESK

SEQ ID NO: 5995 - protein, 5 aa, ARTIFICIAL SEQUENCE
  Synthetic Construct
KTETK

SEQ ID NO: 5996 - protein, 5 aa, ARTIFICIAL SEQUENCE
  Synthetic Construct
KTEYK

SEQ ID NO: 5997 - protein, 5 aa, ARTIFICIAL SEQUENCE
  Synthetic Construct
KTFAK

SEQ ID NO: 5998 - protein, 5 aa, ARTIFICIAL SEQUENCE
  Synthetic Construct
KTFDK

SEQ ID NO: 5999 - protein, 5 aa, ARTIFICIAL SEQUENCE
  Synthetic Construct
KTFEK

SEQ ID NO: 6000 - protein, 5 aa, ARTIFICIAL SEQUENCE
  Synthetic Construct
KTFFK

SEQ ID NO: 6001 - protein, 5 aa, ARTIFICIAL SEQUENCE
  Synthetic Construct
KTFGK

SEQ ID NO: 6002 - protein, 5 aa, ARTIFICIAL SEQUENCE
  Synthetic Construct
KTFHK

SEQ ID NO: 6003 - protein, 5 aa, ARTIFICIAL SEQUENCE
  Synthetic Construct
KTFIK

SEQ ID NO: 6004 - protein, 5 aa, ARTIFICIAL SEQUENCE
  Synthetic Construct
KTFLK

SEQ ID NO: 6005 - protein, 5 aa, ARTIFICIAL SEQUENCE
  Synthetic Construct
KTFNK

SEQ ID NO: 6006 - protein, 5 aa, ARTIFICIAL SEQUENCE
  Synthetic Construct
KTFQK

SEQ ID NO: 6007 - protein, 5 aa, ARTIFICIAL SEQUENCE
  Synthetic Construct
KTFRK

SEQ ID NO: 6008 - protein, 5 aa, ARTIFICIAL SEQUENCE
  Synthetic Construct
KTFSK

SEQ ID NO: 6009 - protein, 5 aa, ARTIFICIAL SEQUENCE
  Synthetic Construct
KTFTK

SEQ ID NO: 6010 - protein, 5 aa, ARTIFICIAL SEQUENCE
  Synthetic Construct
KTFYK

SEQ ID NO: 6011 - protein, 5 aa, ARTIFICIAL SEQUENCE
  Synthetic Construct
KTGAK

SEQ ID NO: 6012 - protein, 5 aa, ARTIFICIAL SEQUENCE
  Synthetic Construct
KTGDK

SEQ ID NO: 6013 - protein, 5 aa, ARTIFICIAL SEQUENCE
  Synthetic Construct
KTGEK

SEQ ID NO: 6014 - protein, 5 aa, ARTIFICIAL SEQUENCE
  Synthetic Construct
KTGFK

SEQ ID NO: 6015 - protein, 5 aa, ARTIFICIAL SEQUENCE
  Synthetic Construct
KTGGK

SEQ ID NO: 6016 - protein, 5 aa, ARTIFICIAL SEQUENCE
  Synthetic Construct
KTGHK

SEQ ID NO: 6017 - protein, 5 aa, ARTIFICIAL SEQUENCE
  Synthetic Construct
KTGIK

SEQ ID NO: 6018 - protein, 5 aa, ARTIFICIAL SEQUENCE
  Synthetic Construct
KTGLK

SEQ ID NO: 6019 - protein, 5 aa, ARTIFICIAL SEQUENCE
  Synthetic Construct
KTGNK

SEQ ID NO: 6020 - protein, 5 aa, ARTIFICIAL SEQUENCE
  Synthetic Construct
KTGQK

SEQ ID NO: 6021 - protein, 5 aa, ARTIFICIAL SEQUENCE
  Synthetic Construct
KTGRK

SEQ ID NO: 6022 - protein, 5 aa, ARTIFICIAL SEQUENCE
  Synthetic Construct
KTGSK

SEQ ID NO: 6023 - protein, 5 aa, ARTIFICIAL SEQUENCE
  Synthetic Construct
KTGTK

SEQ ID NO: 6024 - protein, 5 aa, ARTIFICIAL SEQUENCE
  Synthetic Construct
KTGYK

SEQ ID NO: 6025 - protein, 5 aa, ARTIFICIAL SEQUENCE
  Synthetic Construct
KTHAK

SEQ ID NO: 6026 - protein, 5 aa, ARTIFICIAL SEQUENCE
  Synthetic Construct
KTHDK

SEQ ID NO: 6027 - protein, 5 aa, ARTIFICIAL SEQUENCE
  Synthetic Construct
KTHEK

SEQ ID NO: 6028 - protein, 5 aa, ARTIFICIAL SEQUENCE
  Synthetic Construct
KTHFK

SEQ ID NO: 6029 - protein, 5 aa, ARTIFICIAL SEQUENCE
  Synthetic Construct
KTHGK

SEQ ID NO: 6030 - protein, 5 aa, ARTIFICIAL SEQUENCE
  Synthetic Construct
KTHHK

SEQ ID NO: 6031 - protein, 5 aa, ARTIFICIAL SEQUENCE
  Synthetic Construct
KTHIK

SEQ ID NO: 6032 - protein, 5 aa, ARTIFICIAL SEQUENCE
  Synthetic Construct
KTHLK

SEQ ID NO: 6033 - protein, 5 aa, ARTIFICIAL SEQUENCE
  Synthetic Construct
KTHNK

SEQ ID NO: 6034 - protein, 5 aa, ARTIFICIAL SEQUENCE
  Synthetic Construct
KTHQK

SEQ ID NO: 6035 - protein, 5 aa, ARTIFICIAL SEQUENCE
  Synthetic Construct
KTHRK

SEQ ID NO: 6036 - protein, 5 aa, ARTIFICIAL SEQUENCE
  Synthetic Construct
KTHSK

SEQ ID NO: 6037 - protein, 5 aa, ARTIFICIAL SEQUENCE
  Synthetic Construct
KTHTK

SEQ ID NO: 6038 - protein, 5 aa, ARTIFICIAL SEQUENCE
  Synthetic Construct
KTHYK

SEQ ID NO: 6039 - protein, 5 aa, ARTIFICIAL SEQUENCE
  Synthetic Construct
KTIAK

SEQ ID NO: 6040 - protein, 5 aa, ARTIFICIAL SEQUENCE
  Synthetic Construct
KTIDK

SEQ ID NO: 6041 - protein, 5 aa, ARTIFICIAL SEQUENCE
  Synthetic Construct
KTIEK

SEQ ID NO: 6042 - protein, 5 aa, ARTIFICIAL SEQUENCE
  Synthetic Construct
KTIFK

SEQ ID NO: 6043 - protein, 5 aa, ARTIFICIAL SEQUENCE
  Synthetic Construct
KTIGK

SEQ ID NO: 6044 - protein, 5 aa, ARTIFICIAL SEQUENCE
  Synthetic Construct
KTIHK

SEQ ID NO: 6045 - protein, 5 aa, ARTIFICIAL SEQUENCE
  Synthetic Construct
KTIIK

SEQ ID NO: 6046 - protein, 5 aa, ARTIFICIAL SEQUENCE
  Synthetic Construct
KTILK

SEQ ID NO: 6047 - protein, 5 aa, ARTIFICIAL SEQUENCE
  Synthetic Construct
KTINK

SEQ ID NO: 6048 - protein, 5 aa, ARTIFICIAL SEQUENCE
  Synthetic Construct
KTIQK

SEQ ID NO: 6049 - protein, 5 aa, ARTIFICIAL SEQUENCE
  Synthetic Construct
KTIRK

SEQ ID NO: 6050 - protein, 5 aa, ARTIFICIAL SEQUENCE
  Synthetic Construct
KTISK

SEQ ID NO: 6051 - protein, 5 aa, ARTIFICIAL SEQUENCE
  Synthetic Construct
KTITK

SEQ ID NO: 6052 - protein, 5 aa, ARTIFICIAL SEQUENCE
  Synthetic Construct
KTIYK

SEQ ID NO: 6053 - protein, 5 aa, ARTIFICIAL SEQUENCE
  Synthetic Construct
KTLAK

SEQ ID NO: 6054 - protein, 5 aa, ARTIFICIAL SEQUENCE
  Synthetic Construct
KTLDK

SEQ ID NO: 6055 - protein, 5 aa, ARTIFICIAL SEQUENCE
  Synthetic Construct
KTLEK

SEQ ID NO: 6056 - protein, 5 aa, ARTIFICIAL SEQUENCE
  Synthetic Construct
KTLFK

SEQ ID NO: 6057 - protein, 5 aa, ARTIFICIAL SEQUENCE
  Synthetic Construct
KTLGK

SEQ ID NO: 6058 - protein, 5 aa, ARTIFICIAL SEQUENCE
  Synthetic Construct
KTLHK

SEQ ID NO: 6059 - protein, 5 aa, ARTIFICIAL SEQUENCE
  Synthetic Construct
KTLIK

SEQ ID NO: 6060 - protein, 5 aa, ARTIFICIAL SEQUENCE
  Synthetic Construct
KTLLK

SEQ ID NO: 6061 - protein, 5 aa, ARTIFICIAL SEQUENCE
  Synthetic Construct
KTLNK

SEQ ID NO: 6062 - protein, 5 aa, ARTIFICIAL SEQUENCE
  Synthetic Construct
KTLQK

SEQ ID NO: 6063 - protein, 5 aa, ARTIFICIAL SEQUENCE
  Synthetic Construct
KTLRK

SEQ ID NO: 6064 - protein, 5 aa, ARTIFICIAL SEQUENCE
  Synthetic Construct
KTLSK

SEQ ID NO: 6065 - protein, 5 aa, ARTIFICIAL SEQUENCE
  Synthetic Construct
KTLTK

SEQ ID NO: 6066 - protein, 5 aa, ARTIFICIAL SEQUENCE
  Synthetic Construct
KTLYK

SEQ ID NO: 6067 - protein, 5 aa, ARTIFICIAL SEQUENCE
  Synthetic Construct
KTNAK

SEQ ID NO: 6068 - protein, 5 aa, ARTIFICIAL SEQUENCE
  Synthetic Construct
KTNDK

SEQ ID NO: 6069 - protein, 5 aa, ARTIFICIAL SEQUENCE
  Synthetic Construct
KTNEK

SEQ ID NO: 6070 - protein, 5 aa, ARTIFICIAL SEQUENCE
  Synthetic Construct
KTNFK

SEQ ID NO: 6071 - protein, 5 aa, ARTIFICIAL SEQUENCE
  Synthetic Construct
KTNGK

SEQ ID NO: 6072 - protein, 5 aa, ARTIFICIAL SEQUENCE
  Synthetic Construct
KTNHK

SEQ ID NO: 6073 - protein, 5 aa, ARTIFICIAL SEQUENCE
  Synthetic Construct
KTNIK

SEQ ID NO: 6074 - protein, 5 aa, ARTIFICIAL SEQUENCE
  Synthetic Construct
KTNLK

SEQ ID NO: 6075 - protein, 5 aa, ARTIFICIAL SEQUENCE
  Synthetic Construct
KTNNK

SEQ ID NO: 6076 - protein, 5 aa, ARTIFICIAL SEQUENCE
  Synthetic Construct
KTNQK

SEQ ID NO: 6077 - protein, 5 aa, ARTIFICIAL SEQUENCE
  Synthetic Construct
KTNRK

SEQ ID NO: 6078 - protein, 5 aa, ARTIFICIAL SEQUENCE
  Synthetic Construct
KTNSK

SEQ ID NO: 6079 - protein, 5 aa, ARTIFICIAL SEQUENCE
  Synthetic Construct
KTNTK

SEQ ID NO: 6080 - protein, 5 aa, ARTIFICIAL SEQUENCE
  Synthetic Construct
KTNYK

SEQ ID NO: 6081 - protein, 5 aa, ARTIFICIAL SEQUENCE
  Synthetic Construct
KTPAK

SEQ ID NO: 6082 - protein, 5 aa, ARTIFICIAL SEQUENCE
  Synthetic Construct
KTPDK

SEQ ID NO: 6083 - protein, 5 aa, ARTIFICIAL SEQUENCE
  Synthetic Construct
KTPEK

SEQ ID NO: 6084 - protein, 5 aa, ARTIFICIAL SEQUENCE
  Synthetic Construct
KTPFK

SEQ ID NO: 6085 - protein, 5 aa, ARTIFICIAL SEQUENCE
  Synthetic Construct
KTPGK

SEQ ID NO: 6086 - protein, 5 aa, ARTIFICIAL SEQUENCE
  Synthetic Construct
KTPHK

SEQ ID NO: 6087 - protein, 5 aa, ARTIFICIAL SEQUENCE
  Synthetic Construct
KTPIK

SEQ ID NO: 6088 - protein, 5 aa, ARTIFICIAL SEQUENCE
  Synthetic Construct
KTPLK

SEQ ID NO: 6089 - protein, 5 aa, ARTIFICIAL SEQUENCE
  Synthetic Construct
KTPNK

SEQ ID NO: 6090 - protein, 5 aa, ARTIFICIAL SEQUENCE
  Synthetic Construct
KTPQK

SEQ ID NO: 6091 - protein, 5 aa, ARTIFICIAL SEQUENCE
  Synthetic Construct
KTPRK

SEQ ID NO: 6092 - protein, 5 aa, ARTIFICIAL SEQUENCE
  Synthetic Construct
KTPSK

SEQ ID NO: 6093 - protein, 5 aa, ARTIFICIAL SEQUENCE
  Synthetic Construct
KTPTK

SEQ ID NO: 6094 - protein, 5 aa, ARTIFICIAL SEQUENCE
  Synthetic Construct
KTPYK

SEQ ID NO: 6095 - protein, 5 aa, ARTIFICIAL SEQUENCE
  Synthetic Construct
KTQAK

SEQ ID NO: 6096 - protein, 5 aa, ARTIFICIAL SEQUENCE
  Synthetic Construct
KTQDK

SEQ ID NO: 6097 - protein, 5 aa, ARTIFICIAL SEQUENCE
  Synthetic Construct
KTQEK

SEQ ID NO: 6098 - protein, 5 aa, ARTIFICIAL SEQUENCE
  Synthetic Construct
KTQFK

SEQ ID NO: 6099 - protein, 5 aa, ARTIFICIAL SEQUENCE
  Synthetic Construct
KTQGK

SEQ ID NO: 6100 - protein, 5 aa, ARTIFICIAL SEQUENCE
  Synthetic Construct
KTQHK

SEQ ID NO: 6101 - protein, 5 aa, ARTIFICIAL SEQUENCE
  Synthetic Construct
KTQIK

SEQ ID NO: 6102 - protein, 5 aa, ARTIFICIAL SEQUENCE
  Synthetic Construct
KTQLK

SEQ ID NO: 6103 - protein, 5 aa, ARTIFICIAL SEQUENCE
  Synthetic Construct
KTQNK

SEQ ID NO: 6104 - protein, 5 aa, ARTIFICIAL SEQUENCE
  Synthetic Construct
KTQQK

SEQ ID NO: 6105 - protein, 5 aa, ARTIFICIAL SEQUENCE
  Synthetic Construct
KTQRK

SEQ ID NO: 6106 - protein, 5 aa, ARTIFICIAL SEQUENCE
  Synthetic Construct
KTQSK

SEQ ID NO: 6107 - protein, 5 aa, ARTIFICIAL SEQUENCE
  Synthetic Construct
KTQTK

SEQ ID NO: 6108 - protein, 5 aa, ARTIFICIAL SEQUENCE
  Synthetic Construct
KTQYK

SEQ ID NO: 6109 - protein, 5 aa, ARTIFICIAL SEQUENCE
  Synthetic Construct
KTRAK

SEQ ID NO: 6110 - protein, 5 aa, ARTIFICIAL SEQUENCE
  Synthetic Construct
KTRDK

SEQ ID NO: 6111 - protein, 5 aa, ARTIFICIAL SEQUENCE
  Synthetic Construct
KTREK

SEQ ID NO: 6112 - protein, 5 aa, ARTIFICIAL SEQUENCE
  Synthetic Construct
KTRFK

SEQ ID NO: 6113 - protein, 5 aa, ARTIFICIAL SEQUENCE
  Synthetic Construct
KTRGK

SEQ ID NO: 6114 - protein, 5 aa, ARTIFICIAL SEQUENCE
  Synthetic Construct
KTRHK

SEQ ID NO: 6115 - protein, 5 aa, ARTIFICIAL SEQUENCE
  Synthetic Construct
KTRIK

SEQ ID NO: 6116 - protein, 5 aa, ARTIFICIAL SEQUENCE
  Synthetic Construct
KTRLK

SEQ ID NO: 6117 - protein, 5 aa, ARTIFICIAL SEQUENCE
  Synthetic Construct
KTRNK

SEQ ID NO: 6118 - protein, 5 aa, ARTIFICIAL SEQUENCE
  Synthetic Construct
KTRQK

SEQ ID NO: 6119 - protein, 5 aa, ARTIFICIAL SEQUENCE
  Synthetic Construct
KTRRK

SEQ ID NO: 6120 - protein, 5 aa, ARTIFICIAL SEQUENCE
  Synthetic Construct
KTRSK

SEQ ID NO: 6121 - protein, 5 aa, ARTIFICIAL SEQUENCE
  Synthetic Construct
KTRTK

SEQ ID NO: 6122 - protein, 5 aa, ARTIFICIAL SEQUENCE
  Synthetic Construct
KTRYK

SEQ ID NO: 6123 - protein, 5 aa, ARTIFICIAL SEQUENCE
  Synthetic Construct
KTSAK

SEQ ID NO: 6124 - protein, 5 aa, ARTIFICIAL SEQUENCE
  Synthetic Construct
KTSDK

SEQ ID NO: 6125 - protein, 5 aa, ARTIFICIAL SEQUENCE
  Synthetic Construct
KTSEK

SEQ ID NO: 6126 - protein, 5 aa, ARTIFICIAL SEQUENCE
  Synthetic Construct
KTSFK

SEQ ID NO: 6127 - protein, 5 aa, ARTIFICIAL SEQUENCE
  Synthetic Construct
KTSGK

SEQ ID NO: 6128 - protein, 5 aa, ARTIFICIAL SEQUENCE
  Synthetic Construct
KTSHK

SEQ ID NO: 6129 - protein, 5 aa, ARTIFICIAL SEQUENCE
  Synthetic Construct
KTSIK

SEQ ID NO: 6130 - protein, 5 aa, ARTIFICIAL SEQUENCE
  Synthetic Construct
KTSLK

SEQ ID NO: 6131 - protein, 5 aa, ARTIFICIAL SEQUENCE
  Synthetic Construct
KTSNK

SEQ ID NO: 6132 - protein, 5 aa, ARTIFICIAL SEQUENCE
  Synthetic Construct
KTSQK

SEQ ID NO: 6133 - protein, 5 aa, ARTIFICIAL SEQUENCE
  Synthetic Construct
KTSRK

SEQ ID NO: 6134 - protein, 5 aa, ARTIFICIAL SEQUENCE
  Synthetic Construct
KTSSK

SEQ ID NO: 6135 - protein, 5 aa, ARTIFICIAL SEQUENCE
  Synthetic Construct
KTSTK

SEQ ID NO: 6136 - protein, 5 aa, ARTIFICIAL SEQUENCE
  Synthetic Construct
KTSYK

SEQ ID NO: 6137 - protein, 5 aa, ARTIFICIAL SEQUENCE
  Synthetic Construct
KTTAK

SEQ ID NO: 6138 - protein, 5 aa, ARTIFICIAL SEQUENCE
  Synthetic Construct
KTTDK

SEQ ID NO: 6139 - protein, 5 aa, ARTIFICIAL SEQUENCE
  Synthetic Construct
KTTEK

SEQ ID NO: 6140 - protein, 5 aa, ARTIFICIAL SEQUENCE
  Synthetic Construct
KTTFK

SEQ ID NO: 6141 - protein, 5 aa, ARTIFICIAL SEQUENCE
  Synthetic Construct
KTTGK

SEQ ID NO: 6142 - protein, 5 aa, ARTIFICIAL SEQUENCE
  Synthetic Construct
KTTHK

SEQ ID NO: 6143 - protein, 5 aa, ARTIFICIAL SEQUENCE
  Synthetic Construct
KTTIK

SEQ ID NO: 6144 - protein, 5 aa, ARTIFICIAL SEQUENCE
  Synthetic Construct
KTTLK

SEQ ID NO: 6145 - protein, 5 aa, ARTIFICIAL SEQUENCE
  Synthetic Construct
KTTNK

SEQ ID NO: 6146 - protein, 5 aa, ARTIFICIAL SEQUENCE
  Synthetic Construct
KTTQK

SEQ ID NO: 6147 - protein, 5 aa, ARTIFICIAL SEQUENCE
  Synthetic Construct
KTTRK

SEQ ID NO: 6148 - protein, 5 aa, ARTIFICIAL SEQUENCE
  Synthetic Construct
KTTSK

SEQ ID NO: 6149 - protein, 5 aa, ARTIFICIAL SEQUENCE
  Synthetic Construct
KTTTK

SEQ ID NO: 6150 - protein, 5 aa, ARTIFICIAL SEQUENCE
  Synthetic Construct
KTTYK

SEQ ID NO: 6151 - protein, 5 aa, ARTIFICIAL SEQUENCE
  Synthetic Construct
KTYAK

SEQ ID NO: 6152 - protein, 5 aa, ARTIFICIAL SEQUENCE
  Synthetic Construct
KTYDK

SEQ ID NO: 6153 - protein, 5 aa, ARTIFICIAL SEQUENCE
  Synthetic Construct
KTYEK

SEQ ID NO: 6154 - protein, 5 aa, ARTIFICIAL SEQUENCE
  Synthetic Construct
KTYFK

SEQ ID NO: 6155 - protein, 5 aa, ARTIFICIAL SEQUENCE
  Synthetic Construct
KTYGK

SEQ ID NO: 6156 - protein, 5 aa, ARTIFICIAL SEQUENCE
  Synthetic Construct
KTYHK

SEQ ID NO: 6157 - protein, 5 aa, ARTIFICIAL SEQUENCE
  Synthetic Construct
KTYIK

SEQ ID NO: 6158 - protein, 5 aa, ARTIFICIAL SEQUENCE
  Synthetic Construct
KTYLK

SEQ ID NO: 6159 - protein, 5 aa, ARTIFICIAL SEQUENCE
  Synthetic Construct
KTYNK

SEQ ID NO: 6160 - protein, 5 aa, ARTIFICIAL SEQUENCE
  Synthetic Construct
KTYQK

SEQ ID NO: 6161 - protein, 5 aa, ARTIFICIAL SEQUENCE
  Synthetic Construct
KTYRK

SEQ ID NO: 6162 - protein, 5 aa, ARTIFICIAL SEQUENCE
  Synthetic Construct
KTYSK

SEQ ID NO: 6163 - protein, 5 aa, ARTIFICIAL SEQUENCE
  Synthetic Construct
KTYTK

SEQ ID NO: 6164 - protein, 5 aa, ARTIFICIAL SEQUENCE
  Synthetic Construct
KTYYK

SEQ ID NO: 6165 - protein, 5 aa, ARTIFICIAL SEQUENCE
  Synthetic Construct
KYAAK

SEQ ID NO: 6166 - protein, 5 aa, ARTIFICIAL SEQUENCE
  Synthetic Construct
KYADK

SEQ ID NO: 6167 - protein, 5 aa, ARTIFICIAL SEQUENCE
  Synthetic Construct
KYAEK

SEQ ID NO: 6168 - protein, 5 aa, ARTIFICIAL SEQUENCE
  Synthetic Construct
KYAFK

SEQ ID NO: 6169 - protein, 5 aa, ARTIFICIAL SEQUENCE
  Synthetic Construct
KYAGK

SEQ ID NO: 6170 - protein, 5 aa, ARTIFICIAL SEQUENCE
  Synthetic Construct
KYAHK

SEQ ID NO: 6171 - protein, 5 aa, ARTIFICIAL SEQUENCE
  Synthetic Construct
KYAIK

SEQ ID NO: 6172 - protein, 5 aa, ARTIFICIAL SEQUENCE
  Synthetic Construct
KYALK

SEQ ID NO: 6173 - protein, 5 aa, ARTIFICIAL SEQUENCE
  Synthetic Construct
KYANK

SEQ ID NO: 6174 - protein, 5 aa, ARTIFICIAL SEQUENCE
  Synthetic Construct
KYAQK

SEQ ID NO: 6175 - protein, 5 aa, ARTIFICIAL SEQUENCE
  Synthetic Construct
KYARK

SEQ ID NO: 6176 - protein, 5 aa, ARTIFICIAL SEQUENCE
  Synthetic Construct
KYASK

SEQ ID NO: 6177 - protein, 5 aa, ARTIFICIAL SEQUENCE
  Synthetic Construct
KYATK

SEQ ID NO: 6178 - protein, 5 aa, ARTIFICIAL SEQUENCE
  Synthetic Construct
KYAYK

SEQ ID NO: 6179 - protein, 5 aa, ARTIFICIAL SEQUENCE
  Synthetic Construct
KYDAK

SEQ ID NO: 6180 - protein, 5 aa, ARTIFICIAL SEQUENCE
  Synthetic Construct
KYDDK

SEQ ID NO: 6181 - protein, 5 aa, ARTIFICIAL SEQUENCE
  Synthetic Construct
KYDEK

SEQ ID NO: 6182 - protein, 5 aa, ARTIFICIAL SEQUENCE
  Synthetic Construct
KYDFK

SEQ ID NO: 6183 - protein, 5 aa, ARTIFICIAL SEQUENCE
  Synthetic Construct
KYDGK

SEQ ID NO: 6184 - protein, 5 aa, ARTIFICIAL SEQUENCE
  Synthetic Construct
KYDHK

SEQ ID NO: 6185 - protein, 5 aa, ARTIFICIAL SEQUENCE
  Synthetic Construct
KYDIK

SEQ ID NO: 6186 - protein, 5 aa, ARTIFICIAL SEQUENCE
  Synthetic Construct
KYDLK

SEQ ID NO: 6187 - protein, 5 aa, ARTIFICIAL SEQUENCE
  Synthetic Construct
KYDNK

SEQ ID NO: 6188 - protein, 5 aa, ARTIFICIAL SEQUENCE
  Synthetic Construct
KYDQK

SEQ ID NO: 6189 - protein, 5 aa, ARTIFICIAL SEQUENCE
  Synthetic Construct
KYDRK

SEQ ID NO: 6190 - protein, 5 aa, ARTIFICIAL SEQUENCE
  Synthetic Construct
KYDSK

SEQ ID NO: 6191 - protein, 5 aa, ARTIFICIAL SEQUENCE
  Synthetic Construct
KYDTK

SEQ ID NO: 6192 - protein, 5 aa, ARTIFICIAL SEQUENCE
  Synthetic Construct
KYDYK

SEQ ID NO: 6193 - protein, 5 aa, ARTIFICIAL SEQUENCE
  Synthetic Construct
KYEAK

SEQ ID NO: 6194 - protein, 5 aa, ARTIFICIAL SEQUENCE
  Synthetic Construct
KYEDK

SEQ ID NO: 6195 - protein, 5 aa, ARTIFICIAL SEQUENCE
  Synthetic Construct
KYEEK

SEQ ID NO: 6196 - protein, 5 aa, ARTIFICIAL SEQUENCE
  Synthetic Construct
KYEFK

SEQ ID NO: 6197 - protein, 5 aa, ARTIFICIAL SEQUENCE
  Synthetic Construct
KYEGK

SEQ ID NO: 6198 - protein, 5 aa, ARTIFICIAL SEQUENCE
  Synthetic Construct
KYEHK

SEQ ID NO: 6199 - protein, 5 aa, ARTIFICIAL SEQUENCE
  Synthetic Construct
KYEIK

SEQ ID NO: 6200 - protein, 5 aa, ARTIFICIAL SEQUENCE
  Synthetic Construct
KYELK

SEQ ID NO: 6201 - protein, 5 aa, ARTIFICIAL SEQUENCE
  Synthetic Construct
KYENK

SEQ ID NO: 6202 - protein, 5 aa, ARTIFICIAL SEQUENCE
  Synthetic Construct
KYEQK

SEQ ID NO: 6203 - protein, 5 aa, ARTIFICIAL SEQUENCE
  Synthetic Construct
KYERK

SEQ ID NO: 6204 - protein, 5 aa, ARTIFICIAL SEQUENCE
  Synthetic Construct
KYESK

SEQ ID NO: 6205 - protein, 5 aa, ARTIFICIAL SEQUENCE
  Synthetic Construct
KYETK

SEQ ID NO: 6206 - protein, 5 aa, ARTIFICIAL SEQUENCE
  Synthetic Construct
KYEYK

SEQ ID NO: 6207 - protein, 5 aa, ARTIFICIAL SEQUENCE
  Synthetic Construct
KYFAK

SEQ ID NO: 6208 - protein, 5 aa, ARTIFICIAL SEQUENCE
  Synthetic Construct
KYFDK

SEQ ID NO: 6209 - protein, 5 aa, ARTIFICIAL SEQUENCE
  Synthetic Construct
KYFEK

SEQ ID NO: 6210 - protein, 5 aa, ARTIFICIAL SEQUENCE
  Synthetic Construct
KYFFK

SEQ ID NO: 6211 - protein, 5 aa, ARTIFICIAL SEQUENCE
  Synthetic Construct
KYFGK

SEQ ID NO: 6212 - protein, 5 aa, ARTIFICIAL SEQUENCE
  Synthetic Construct
KYFHK

SEQ ID NO: 6213 - protein, 5 aa, ARTIFICIAL SEQUENCE
  Synthetic Construct
KYFIK

SEQ ID NO: 6214 - protein, 5 aa, ARTIFICIAL SEQUENCE
  Synthetic Construct
KYFLK

SEQ ID NO: 6215 - protein, 5 aa, ARTIFICIAL SEQUENCE
  Synthetic Construct
KYFNK

SEQ ID NO: 6216 - protein, 5 aa, ARTIFICIAL SEQUENCE
  Synthetic Construct
KYFQK

SEQ ID NO: 6217 - protein, 5 aa, ARTIFICIAL SEQUENCE
  Synthetic Construct
KYFRK

SEQ ID NO: 6218 - protein, 5 aa, ARTIFICIAL SEQUENCE
  Synthetic Construct
KYFSK

SEQ ID NO: 6219 - protein, 5 aa, ARTIFICIAL SEQUENCE
  Synthetic Construct
KYFTK

SEQ ID NO: 6220 - protein, 5 aa, ARTIFICIAL SEQUENCE
  Synthetic Construct
KYFYK

SEQ ID NO: 6221 - protein, 5 aa, ARTIFICIAL SEQUENCE
  Synthetic Construct
KYGAK

SEQ ID NO: 6222 - protein, 5 aa, ARTIFICIAL SEQUENCE
  Synthetic Construct
KYGDK

SEQ ID NO: 6223 - protein, 5 aa, ARTIFICIAL SEQUENCE
  Synthetic Construct
KYGEK

SEQ ID NO: 6224 - protein, 5 aa, ARTIFICIAL SEQUENCE
  Synthetic Construct
KYGFK

SEQ ID NO: 6225 - protein, 5 aa, ARTIFICIAL SEQUENCE
  Synthetic Construct
KYGGK

SEQ ID NO: 6226 - protein, 5 aa, ARTIFICIAL SEQUENCE
  Synthetic Construct
KYGHK

SEQ ID NO: 6227 - protein, 5 aa, ARTIFICIAL SEQUENCE
  Synthetic Construct
KYGIK

SEQ ID NO: 6228 - protein, 5 aa, ARTIFICIAL SEQUENCE
  Synthetic Construct
KYGLK

SEQ ID NO: 6229 - protein, 5 aa, ARTIFICIAL SEQUENCE
  Synthetic Construct
KYGNK

SEQ ID NO: 6230 - protein, 5 aa, ARTIFICIAL SEQUENCE
  Synthetic Construct
KYGQK

SEQ ID NO: 6231 - protein, 5 aa, ARTIFICIAL SEQUENCE
  Synthetic Construct
KYGRK

SEQ ID NO: 6232 - protein, 5 aa, ARTIFICIAL SEQUENCE
  Synthetic Construct
KYGSK

SEQ ID NO: 6233 - protein, 5 aa, ARTIFICIAL SEQUENCE
  Synthetic Construct
KYGTK

SEQ ID NO: 6234 - protein, 5 aa, ARTIFICIAL SEQUENCE
  Synthetic Construct
KYGYK

SEQ ID NO: 6235 - protein, 5 aa, ARTIFICIAL SEQUENCE
  Synthetic Construct
KYHAK

SEQ ID NO: 6236 - protein, 5 aa, ARTIFICIAL SEQUENCE
  Synthetic Construct
KYHDK

SEQ ID NO: 6237 - protein, 5 aa, ARTIFICIAL SEQUENCE
  Synthetic Construct
KYHEK

SEQ ID NO: 6238 - protein, 5 aa, ARTIFICIAL SEQUENCE
  Synthetic Construct
KYHFK

SEQ ID NO: 6239 - protein, 5 aa, ARTIFICIAL SEQUENCE
  Synthetic Construct
KYHGK

SEQ ID NO: 6240 - protein, 5 aa, ARTIFICIAL SEQUENCE
  Synthetic Construct
KYHHK

SEQ ID NO: 6241 - protein, 5 aa, ARTIFICIAL SEQUENCE
  Synthetic Construct
KYHIK

SEQ ID NO: 6242 - protein, 5 aa, ARTIFICIAL SEQUENCE
  Synthetic Construct
KYHLK

SEQ ID NO: 6243 - protein, 5 aa, ARTIFICIAL SEQUENCE
  Synthetic Construct
KYHNK

SEQ ID NO: 6244 - protein, 5 aa, ARTIFICIAL SEQUENCE
  Synthetic Construct
KYHQK

SEQ ID NO: 6245 - protein, 5 aa, ARTIFICIAL SEQUENCE
  Synthetic Construct
KYHRK

SEQ ID NO: 6246 - protein, 5 aa, ARTIFICIAL SEQUENCE
  Synthetic Construct
KYHSK

SEQ ID NO: 6247 - protein, 5 aa, ARTIFICIAL SEQUENCE
  Synthetic Construct
KYHTK

SEQ ID NO: 6248 - protein, 5 aa, ARTIFICIAL SEQUENCE
  Synthetic Construct
KYHYK

SEQ ID NO: 6249 - protein, 5 aa, ARTIFICIAL SEQUENCE
  Synthetic Construct
KYIAK

SEQ ID NO: 6250 - protein, 5 aa, ARTIFICIAL SEQUENCE
  Synthetic Construct
KYIDK

SEQ ID NO: 6251 - protein, 5 aa, ARTIFICIAL SEQUENCE
  Synthetic Construct
KYIEK

SEQ ID NO: 6252 - protein, 5 aa, ARTIFICIAL SEQUENCE
  Synthetic Construct
KYIFK

SEQ ID NO: 6253 - protein, 5 aa, ARTIFICIAL SEQUENCE
  Synthetic Construct
KYIGK

SEQ ID NO: 6254 - protein, 5 aa, ARTIFICIAL SEQUENCE
  Synthetic Construct
KYIHK

SEQ ID NO: 6255 - protein, 5 aa, ARTIFICIAL SEQUENCE
  Synthetic Construct
KYIIK

SEQ ID NO: 6256 - protein, 5 aa, ARTIFICIAL SEQUENCE
  Synthetic Construct
KYILK

SEQ ID NO: 6257 - protein, 5 aa, ARTIFICIAL SEQUENCE
  Synthetic Construct
KYINK

SEQ ID NO: 6258 - protein, 5 aa, ARTIFICIAL SEQUENCE
  Synthetic Construct
KYIQK

SEQ ID NO: 6259 - protein, 5 aa, ARTIFICIAL SEQUENCE
  Synthetic Construct
KYIRK

SEQ ID NO: 6260 - protein, 5 aa, ARTIFICIAL SEQUENCE
  Synthetic Construct
KYISK

SEQ ID NO: 6261 - protein, 5 aa, ARTIFICIAL SEQUENCE
  Synthetic Construct
KYITK

SEQ ID NO: 6262 - protein, 5 aa, ARTIFICIAL SEQUENCE
  Synthetic Construct
KYIYK

SEQ ID NO: 6263 - protein, 5 aa, ARTIFICIAL SEQUENCE
  Synthetic Construct
KYLAK

SEQ ID NO: 6264 - protein, 5 aa, ARTIFICIAL SEQUENCE
  Synthetic Construct
KYLDK

SEQ ID NO: 6265 - protein, 5 aa, ARTIFICIAL SEQUENCE
  Synthetic Construct
KYLEK

SEQ ID NO: 6266 - protein, 5 aa, ARTIFICIAL SEQUENCE
  Synthetic Construct
KYLFK

SEQ ID NO: 6267 - protein, 5 aa, ARTIFICIAL SEQUENCE
  Synthetic Construct
KYLGK

SEQ ID NO: 6268 - protein, 5 aa, ARTIFICIAL SEQUENCE
  Synthetic Construct
KYLHK

SEQ ID NO: 6269 - protein, 5 aa, ARTIFICIAL SEQUENCE
  Synthetic Construct
KYLIK

SEQ ID NO: 6270 - protein, 5 aa, ARTIFICIAL SEQUENCE
  Synthetic Construct
KYLLK

SEQ ID NO: 6271 - protein, 5 aa, ARTIFICIAL SEQUENCE
  Synthetic Construct
KYLNK

SEQ ID NO: 6272 - protein, 5 aa, ARTIFICIAL SEQUENCE
  Synthetic Construct
KYLQK

SEQ ID NO: 6273 - protein, 5 aa, ARTIFICIAL SEQUENCE
  Synthetic Construct
KYLRK

SEQ ID NO: 6274 - protein, 5 aa, ARTIFICIAL SEQUENCE
  Synthetic Construct
KYLSK

SEQ ID NO: 6275 - protein, 5 aa, ARTIFICIAL SEQUENCE
  Synthetic Construct
KYLTK

SEQ ID NO: 6276 - protein, 5 aa, ARTIFICIAL SEQUENCE
  Synthetic Construct
KYLYK

SEQ ID NO: 6277 - protein, 5 aa, ARTIFICIAL SEQUENCE
  Synthetic Construct
KYNAK

SEQ ID NO: 6278 - protein, 5 aa, ARTIFICIAL SEQUENCE
  Synthetic Construct
KYNDK

SEQ ID NO: 6279 - protein, 5 aa, ARTIFICIAL SEQUENCE
  Synthetic Construct
KYNEK

SEQ ID NO: 6280 - protein, 5 aa, ARTIFICIAL SEQUENCE
  Synthetic Construct
KYNFK

SEQ ID NO: 6281 - protein, 5 aa, ARTIFICIAL SEQUENCE
  Synthetic Construct
KYNGK

SEQ ID NO: 6282 - protein, 5 aa, ARTIFICIAL SEQUENCE
  Synthetic Construct
KYNHK

SEQ ID NO: 6283 - protein, 5 aa, ARTIFICIAL SEQUENCE
  Synthetic Construct
KYNIK

SEQ ID NO: 6284 - protein, 5 aa, ARTIFICIAL SEQUENCE
  Synthetic Construct
KYNLK

SEQ ID NO: 6285 - protein, 5 aa, ARTIFICIAL SEQUENCE
  Synthetic Construct
KYNNK

SEQ ID NO: 6286 - protein, 5 aa, ARTIFICIAL SEQUENCE
  Synthetic Construct
KYNQK

SEQ ID NO: 6287 - protein, 5 aa, ARTIFICIAL SEQUENCE
  Synthetic Construct
KYNRK

SEQ ID NO: 6288 - protein, 5 aa, ARTIFICIAL SEQUENCE
  Synthetic Construct
KYNSK

SEQ ID NO: 6289 - protein, 5 aa, ARTIFICIAL SEQUENCE
  Synthetic Construct
KYNTK

SEQ ID NO: 6290 - protein, 5 aa, ARTIFICIAL SEQUENCE
  Synthetic Construct
KYNYK

SEQ ID NO: 6291 - protein, 5 aa, ARTIFICIAL SEQUENCE
  Synthetic Construct
KYPAK

SEQ ID NO: 6292 - protein, 5 aa, ARTIFICIAL SEQUENCE
  Synthetic Construct
KYPDK

SEQ ID NO: 6293 - protein, 5 aa, ARTIFICIAL SEQUENCE
  Synthetic Construct
KYPEK

SEQ ID NO: 6294 - protein, 5 aa, ARTIFICIAL SEQUENCE
  Synthetic Construct
KYPFK

SEQ ID NO: 6295 - protein, 5 aa, ARTIFICIAL SEQUENCE
  Synthetic Construct
KYPGK

SEQ ID NO: 6296 - protein, 5 aa, ARTIFICIAL SEQUENCE
  Synthetic Construct
KYPHK

SEQ ID NO: 6297 - protein, 5 aa, ARTIFICIAL SEQUENCE
  Synthetic Construct
KYPIK

SEQ ID NO: 6298 - protein, 5 aa, ARTIFICIAL SEQUENCE
  Synthetic Construct
KYPLK

SEQ ID NO: 6299 - protein, 5 aa, ARTIFICIAL SEQUENCE
  Synthetic Construct
KYPNK

SEQ ID NO: 6300 - protein, 5 aa, ARTIFICIAL SEQUENCE
  Synthetic Construct
KYPQK

SEQ ID NO: 6301 - protein, 5 aa, ARTIFICIAL SEQUENCE
  Synthetic Construct
KYPRK

SEQ ID NO: 6302 - protein, 5 aa, ARTIFICIAL SEQUENCE
  Synthetic Construct
KYPSK

SEQ ID NO: 6303 - protein, 5 aa, ARTIFICIAL SEQUENCE
  Synthetic Construct
KYPTK

SEQ ID NO: 6304 - protein, 5 aa, ARTIFICIAL SEQUENCE
  Synthetic Construct
KYPYK

SEQ ID NO: 6305 - protein, 5 aa, ARTIFICIAL SEQUENCE
  Synthetic Construct
KYQAK

SEQ ID NO: 6306 - protein, 5 aa, ARTIFICIAL SEQUENCE
  Synthetic Construct
KYQDK

SEQ ID NO: 6307 - protein, 5 aa, ARTIFICIAL SEQUENCE
  Synthetic Construct
KYQEK

SEQ ID NO: 6308 - protein, 5 aa, ARTIFICIAL SEQUENCE
  Synthetic Construct
KYQFK

SEQ ID NO: 6309 - protein, 5 aa, ARTIFICIAL SEQUENCE
  Synthetic Construct
KYQGK

SEQ ID NO: 6310 - protein, 5 aa, ARTIFICIAL SEQUENCE
  Synthetic Construct
KYQHK

SEQ ID NO: 6311 - protein, 5 aa, ARTIFICIAL SEQUENCE
  Synthetic Construct
KYQIK

SEQ ID NO: 6312 - protein, 5 aa, ARTIFICIAL SEQUENCE
  Synthetic Construct
KYQLK

SEQ ID NO: 6313 - protein, 5 aa, ARTIFICIAL SEQUENCE
  Synthetic Construct
KYQNK

SEQ ID NO: 6314 - protein, 5 aa, ARTIFICIAL SEQUENCE
  Synthetic Construct
KYQQK

SEQ ID NO: 6315 - protein, 5 aa, ARTIFICIAL SEQUENCE
  Synthetic Construct
KYQRK

SEQ ID NO: 6316 - protein, 5 aa, ARTIFICIAL SEQUENCE
  Synthetic Construct
KYQSK

SEQ ID NO: 6317 - protein, 5 aa, ARTIFICIAL SEQUENCE
  Synthetic Construct
KYQTK

SEQ ID NO: 6318 - protein, 5 aa, ARTIFICIAL SEQUENCE
  Synthetic Construct
KYQYK

SEQ ID NO: 6319 - protein, 5 aa, ARTIFICIAL SEQUENCE
  Synthetic Construct
KYRAK

SEQ ID NO: 6320 - protein, 5 aa, ARTIFICIAL SEQUENCE
  Synthetic Construct
KYRDK

SEQ ID NO: 6321 - protein, 5 aa, ARTIFICIAL SEQUENCE
  Synthetic Construct
KYREK

SEQ ID NO: 6322 - protein, 5 aa, ARTIFICIAL SEQUENCE
  Synthetic Construct
KYRFK

SEQ ID NO: 6323 - protein, 5 aa, ARTIFICIAL SEQUENCE
  Synthetic Construct
KYRGK

SEQ ID NO: 6324 - protein, 5 aa, ARTIFICIAL SEQUENCE
  Synthetic Construct
KYRHK

SEQ ID NO: 6325 - protein, 5 aa, ARTIFICIAL SEQUENCE
  Synthetic Construct
KYRIK

SEQ ID NO: 6326 - protein, 5 aa, ARTIFICIAL SEQUENCE
  Synthetic Construct
KYRLK

SEQ ID NO: 6327 - protein, 5 aa, ARTIFICIAL SEQUENCE
  Synthetic Construct
KYRNK

SEQ ID NO: 6328 - protein, 5 aa, ARTIFICIAL SEQUENCE
  Synthetic Construct
KYRQK

SEQ ID NO: 6329 - protein, 5 aa, ARTIFICIAL SEQUENCE
  Synthetic Construct
KYRRK

SEQ ID NO: 6330 - protein, 5 aa, ARTIFICIAL SEQUENCE
  Synthetic Construct
KYRSK

SEQ ID NO: 6331 - protein, 5 aa, ARTIFICIAL SEQUENCE
  Synthetic Construct
KYRTK

SEQ ID NO: 6332 - protein, 5 aa, ARTIFICIAL SEQUENCE
  Synthetic Construct
KYRYK

SEQ ID NO: 6333 - protein, 5 aa, ARTIFICIAL SEQUENCE
  Synthetic Construct
KYSAK

SEQ ID NO: 6334 - protein, 5 aa, ARTIFICIAL SEQUENCE
  Synthetic Construct
KYSDK

SEQ ID NO: 6335 - protein, 5 aa, ARTIFICIAL SEQUENCE
  Synthetic Construct
KYSEK

SEQ ID NO: 6336 - protein, 5 aa, ARTIFICIAL SEQUENCE
  Synthetic Construct
KYSFK

SEQ ID NO: 6337 - protein, 5 aa, ARTIFICIAL SEQUENCE
  Synthetic Construct
KYSGK

SEQ ID NO: 6338 - protein, 5 aa, ARTIFICIAL SEQUENCE
  Synthetic Construct
KYSHK

SEQ ID NO: 6339 - protein, 5 aa, ARTIFICIAL SEQUENCE
  Synthetic Construct
KYSIK

SEQ ID NO: 6340 - protein, 5 aa, ARTIFICIAL SEQUENCE
  Synthetic Construct
KYSLK

SEQ ID NO: 6341 - protein, 5 aa, ARTIFICIAL SEQUENCE
  Synthetic Construct
KYSNK

SEQ ID NO: 6342 - protein, 5 aa, ARTIFICIAL SEQUENCE
  Synthetic Construct
KYSQK

SEQ ID NO: 6343 - protein, 5 aa, ARTIFICIAL SEQUENCE
  Synthetic Construct
KYSRK

SEQ ID NO: 6344 - protein, 5 aa, ARTIFICIAL SEQUENCE
  Synthetic Construct
KYSSK

SEQ ID NO: 6345 - protein, 5 aa, ARTIFICIAL SEQUENCE
  Synthetic Construct
KYSTK

SEQ ID NO: 6346 - protein, 5 aa, ARTIFICIAL SEQUENCE
  Synthetic Construct
KYSYK

SEQ ID NO: 6347 - protein, 5 aa, ARTIFICIAL SEQUENCE
  Synthetic Construct
KYTAK

SEQ ID NO: 6348 - protein, 5 aa, ARTIFICIAL SEQUENCE
  Synthetic Construct
KYTDK

SEQ ID NO: 6349 - protein, 5 aa, ARTIFICIAL SEQUENCE
  Synthetic Construct
KYTEK

SEQ ID NO: 6350 - protein, 5 aa, ARTIFICIAL SEQUENCE
  Synthetic Construct
KYTFK

SEQ ID NO: 6351 - protein, 5 aa, ARTIFICIAL SEQUENCE
  Synthetic Construct
KYTGK

SEQ ID NO: 6352 - protein, 5 aa, ARTIFICIAL SEQUENCE
  Synthetic Construct
KYTHK

SEQ ID NO: 6353 - protein, 5 aa, ARTIFICIAL SEQUENCE
  Synthetic Construct
KYTIK

SEQ ID NO: 6354 - protein, 5 aa, ARTIFICIAL SEQUENCE
  Synthetic Construct
KYTLK

SEQ ID NO: 6355 - protein, 5 aa, ARTIFICIAL SEQUENCE
  Synthetic Construct
KYTNK

SEQ ID NO: 6356 - protein, 5 aa, ARTIFICIAL SEQUENCE
  Synthetic Construct
KYTQK

SEQ ID NO: 6357 - protein, 5 aa, ARTIFICIAL SEQUENCE
  Synthetic Construct
KYTRK

SEQ ID NO: 6358 - protein, 5 aa, ARTIFICIAL SEQUENCE
  Synthetic Construct
KYTSK

SEQ ID NO: 6359 - protein, 5 aa, ARTIFICIAL SEQUENCE
  Synthetic Construct
KYTTK

SEQ ID NO: 6360 - protein, 5 aa, ARTIFICIAL SEQUENCE
  Synthetic Construct
KYTYK

SEQ ID NO: 6361 - protein, 5 aa, ARTIFICIAL SEQUENCE
  Synthetic Construct
KYYAK

SEQ ID NO: 6362 - protein, 5 aa, ARTIFICIAL SEQUENCE
  Synthetic Construct
KYYDK

SEQ ID NO: 6363 - protein, 5 aa, ARTIFICIAL SEQUENCE
  Synthetic Construct
KYYEK

SEQ ID NO: 6364 - protein, 5 aa, ARTIFICIAL SEQUENCE
  Synthetic Construct
KYYFK

SEQ ID NO: 6365 - protein, 5 aa, ARTIFICIAL SEQUENCE
  Synthetic Construct
KYYGK

SEQ ID NO: 6366 - protein, 5 aa, ARTIFICIAL SEQUENCE
  Synthetic Construct
KYYHK

SEQ ID NO: 6367 - protein, 5 aa, ARTIFICIAL SEQUENCE
  Synthetic Construct
KYYIK

SEQ ID NO: 6368 - protein, 5 aa, ARTIFICIAL SEQUENCE
  Synthetic Construct
KYYLK

SEQ ID NO: 6369 - protein, 5 aa, ARTIFICIAL SEQUENCE
  Synthetic Construct
KYYNK

SEQ ID NO: 6370 - protein, 5 aa, ARTIFICIAL SEQUENCE
  Synthetic Construct
KYYQK

SEQ ID NO: 6371 - protein, 5 aa, ARTIFICIAL SEQUENCE
  Synthetic Construct
KYYRK

SEQ ID NO: 6372 - protein, 5 aa, ARTIFICIAL SEQUENCE
  Synthetic Construct
KYYSK

SEQ ID NO: 6373 - protein, 5 aa, ARTIFICIAL SEQUENCE
  Synthetic Construct
KYYTK

SEQ ID NO: 6374 - protein, 5 aa, ARTIFICIAL SEQUENCE
  Synthetic Construct
KYYYK

SEQ ID NO: 6375 - protein, 6 aa, ARTIFICIAL SEQUENCE
  Synthetic Construct
AKAAAK

SEQ ID NO: 6376 - protein, 6 aa, ARTIFICIAL SEQUENCE
  Synthetic Construct
AKAADK

SEQ ID NO: 6377 - protein, 6 aa, ARTIFICIAL SEQUENCE
  Synthetic Construct
AKAAEK

SEQ ID NO: 6378 - protein, 6 aa, ARTIFICIAL SEQUENCE
  Synthetic Construct
AKAAFK

SEQ ID NO: 6379 - protein, 6 aa, ARTIFICIAL SEQUENCE
  Synthetic Construct
AKAAGK

SEQ ID NO: 6380 - protein, 6 aa, ARTIFICIAL SEQUENCE
  Synthetic Construct
AKAAHK

SEQ ID NO: 6381 - protein, 6 aa, ARTIFICIAL SEQUENCE
  Synthetic Construct
AKAAIK

SEQ ID NO: 6382 - protein, 6 aa, ARTIFICIAL SEQUENCE
  Synthetic Construct
AKAALK

SEQ ID NO: 6383 - protein, 6 aa, ARTIFICIAL SEQUENCE
  Synthetic Construct
AKAANK

SEQ ID NO: 6384 - protein, 6 aa, ARTIFICIAL SEQUENCE
  Synthetic Construct
AKAAQK

SEQ ID NO: 6385 - protein, 6 aa, ARTIFICIAL SEQUENCE
  Synthetic Construct
AKAARK

SEQ ID NO: 6386 - protein, 6 aa, ARTIFICIAL SEQUENCE
  Synthetic Construct
AKAASK

SEQ ID NO: 6387 - protein, 6 aa, ARTIFICIAL SEQUENCE
  Synthetic Construct
AKAATK

SEQ ID NO: 6388 - protein, 6 aa, ARTIFICIAL SEQUENCE
  Synthetic Construct
AKAAYK

SEQ ID NO: 6389 - protein, 6 aa, ARTIFICIAL SEQUENCE
  Synthetic Construct
AKADAK

SEQ ID NO: 6390 - protein, 6 aa, ARTIFICIAL SEQUENCE
  Synthetic Construct
AKADDK

SEQ ID NO: 6391 - protein, 6 aa, ARTIFICIAL SEQUENCE
  Synthetic Construct
AKADEK

SEQ ID NO: 6392 - protein, 6 aa, ARTIFICIAL SEQUENCE
  Synthetic Construct
AKADFK

SEQ ID NO: 6393 - protein, 6 aa, ARTIFICIAL SEQUENCE
  Synthetic Construct
AKADGK

SEQ ID NO: 6394 - protein, 6 aa, ARTIFICIAL SEQUENCE
  Synthetic Construct
AKADHK

SEQ ID NO: 6395 - protein, 6 aa, ARTIFICIAL SEQUENCE
  Synthetic Construct
AKADIK

SEQ ID NO: 6396 - protein, 6 aa, ARTIFICIAL SEQUENCE
  Synthetic Construct
AKADLK

SEQ ID NO: 6397 - protein, 6 aa, ARTIFICIAL SEQUENCE
  Synthetic Construct
AKADNK

SEQ ID NO: 6398 - protein, 6 aa, ARTIFICIAL SEQUENCE
  Synthetic Construct
AKADQK

SEQ ID NO: 6399 - protein, 6 aa, ARTIFICIAL SEQUENCE
  Synthetic Construct
AKADRK

SEQ ID NO: 6400 - protein, 6 aa, ARTIFICIAL SEQUENCE
  Synthetic Construct
AKADSK

SEQ ID NO: 6401 - protein, 6 aa, ARTIFICIAL SEQUENCE
  Synthetic Construct
AKADTK

SEQ ID NO: 6402 - protein, 6 aa, ARTIFICIAL SEQUENCE
  Synthetic Construct
AKADYK

SEQ ID NO: 6403 - protein, 6 aa, ARTIFICIAL SEQUENCE
  Synthetic Construct
AKAEAK

SEQ ID NO: 6404 - protein, 6 aa, ARTIFICIAL SEQUENCE
  Synthetic Construct
AKAEDK

SEQ ID NO: 6405 - protein, 6 aa, ARTIFICIAL SEQUENCE
  Synthetic Construct
AKAEEK

SEQ ID NO: 6406 - protein, 6 aa, ARTIFICIAL SEQUENCE
  Synthetic Construct
AKAEFK

SEQ ID NO: 6407 - protein, 6 aa, ARTIFICIAL SEQUENCE
  Synthetic Construct
AKAEGK

SEQ ID NO: 6408 - protein, 6 aa, ARTIFICIAL SEQUENCE
  Synthetic Construct
AKAEHK

SEQ ID NO: 6409 - protein, 6 aa, ARTIFICIAL SEQUENCE
  Synthetic Construct
AKAEIK

SEQ ID NO: 6410 - protein, 6 aa, ARTIFICIAL SEQUENCE
  Synthetic Construct
AKAELK

SEQ ID NO: 6411 - protein, 6 aa, ARTIFICIAL SEQUENCE
  Synthetic Construct
AKAENK

SEQ ID NO: 6412 - protein, 6 aa, ARTIFICIAL SEQUENCE
  Synthetic Construct
AKAEQK

SEQ ID NO: 6413 - protein, 6 aa, ARTIFICIAL SEQUENCE
  Synthetic Construct
AKAERK

SEQ ID NO: 6414 - protein, 6 aa, ARTIFICIAL SEQUENCE
  Synthetic Construct
AKAESK

SEQ ID NO: 6415 - protein, 6 aa, ARTIFICIAL SEQUENCE
  Synthetic Construct
AKAETK

SEQ ID NO: 6416 - protein, 6 aa, ARTIFICIAL SEQUENCE
  Synthetic Construct
AKAEYK

SEQ ID NO: 6417 - protein, 6 aa, ARTIFICIAL SEQUENCE
  Synthetic Construct
AKAFAK

SEQ ID NO: 6418 - protein, 6 aa, ARTIFICIAL SEQUENCE
  Synthetic Construct
AKAFDK

SEQ ID NO: 6419 - protein, 6 aa, ARTIFICIAL SEQUENCE
  Synthetic Construct
AKAFEK

SEQ ID NO: 6420 - protein, 6 aa, ARTIFICIAL SEQUENCE
  Synthetic Construct
AKAFFK

SEQ ID NO: 6421 - protein, 6 aa, ARTIFICIAL SEQUENCE
  Synthetic Construct
AKAFGK

SEQ ID NO: 6422 - protein, 6 aa, ARTIFICIAL SEQUENCE
  Synthetic Construct
AKAFHK

SEQ ID NO: 6423 - protein, 6 aa, ARTIFICIAL SEQUENCE
  Synthetic Construct
AKAFIK

SEQ ID NO: 6424 - protein, 6 aa, ARTIFICIAL SEQUENCE
  Synthetic Construct
AKAFLK

SEQ ID NO: 6425 - protein, 6 aa, ARTIFICIAL SEQUENCE
  Synthetic Construct
AKAFNK

SEQ ID NO: 6426 - protein, 6 aa, ARTIFICIAL SEQUENCE
  Synthetic Construct
AKAFQK

SEQ ID NO: 6427 - protein, 6 aa, ARTIFICIAL SEQUENCE
  Synthetic Construct
AKAFRK

SEQ ID NO: 6428 - protein, 6 aa, ARTIFICIAL SEQUENCE
  Synthetic Construct
AKAFSK

SEQ ID NO: 6429 - protein, 6 aa, ARTIFICIAL SEQUENCE
  Synthetic Construct
AKAFTK

SEQ ID NO: 6430 - protein, 6 aa, ARTIFICIAL SEQUENCE
  Synthetic Construct
AKAFYK

SEQ ID NO: 6431 - protein, 6 aa, ARTIFICIAL SEQUENCE
  Synthetic Construct
AKAGAK

SEQ ID NO: 6432 - protein, 6 aa, ARTIFICIAL SEQUENCE
  Synthetic Construct
AKAGDK

SEQ ID NO: 6433 - protein, 6 aa, ARTIFICIAL SEQUENCE
  Synthetic Construct
AKAGEK

SEQ ID NO: 6434 - protein, 6 aa, ARTIFICIAL SEQUENCE
  Synthetic Construct
AKAGFK

SEQ ID NO: 6435 - protein, 6 aa, ARTIFICIAL SEQUENCE
  Synthetic Construct
AKAGGK

SEQ ID NO: 6436 - protein, 6 aa, ARTIFICIAL SEQUENCE
  Synthetic Construct
AKAGHK

SEQ ID NO: 6437 - protein, 6 aa, ARTIFICIAL SEQUENCE
  Synthetic Construct
AKAGIK

SEQ ID NO: 6438 - protein, 6 aa, ARTIFICIAL SEQUENCE
  Synthetic Construct
AKAGLK

SEQ ID NO: 6439 - protein, 6 aa, ARTIFICIAL SEQUENCE
  Synthetic Construct
AKAGNK

SEQ ID NO: 6440 - protein, 6 aa, ARTIFICIAL SEQUENCE
  Synthetic Construct
AKAGQK

SEQ ID NO: 6441 - protein, 6 aa, ARTIFICIAL SEQUENCE
  Synthetic Construct
AKAGRK

SEQ ID NO: 6442 - protein, 6 aa, ARTIFICIAL SEQUENCE
  Synthetic Construct
AKAGSK

SEQ ID NO: 6443 - protein, 6 aa, ARTIFICIAL SEQUENCE
  Synthetic Construct
AKAGTK

SEQ ID NO: 6444 - protein, 6 aa, ARTIFICIAL SEQUENCE
  Synthetic Construct
AKAGYK

SEQ ID NO: 6445 - protein, 6 aa, ARTIFICIAL SEQUENCE
  Synthetic Construct
AKAHAK

SEQ ID NO: 6446 - protein, 6 aa, ARTIFICIAL SEQUENCE
  Synthetic Construct
AKAHDK

SEQ ID NO: 6447 - protein, 6 aa, ARTIFICIAL SEQUENCE
  Synthetic Construct
AKAHEK

SEQ ID NO: 6448 - protein, 6 aa, ARTIFICIAL SEQUENCE
  Synthetic Construct
AKAHFK

SEQ ID NO: 6449 - protein, 6 aa, ARTIFICIAL SEQUENCE
  Synthetic Construct
AKAHGK

SEQ ID NO: 6450 - protein, 6 aa, ARTIFICIAL SEQUENCE
  Synthetic Construct
AKAHHK

SEQ ID NO: 6451 - protein, 6 aa, ARTIFICIAL SEQUENCE
  Synthetic Construct
AKAHIK

SEQ ID NO: 6452 - protein, 6 aa, ARTIFICIAL SEQUENCE
  Synthetic Construct
AKAHLK

SEQ ID NO: 6453 - protein, 6 aa, ARTIFICIAL SEQUENCE
  Synthetic Construct
AKAHNK

SEQ ID NO: 6454 - protein, 6 aa, ARTIFICIAL SEQUENCE
  Synthetic Construct
AKAHQK

SEQ ID NO: 6455 - protein, 6 aa, ARTIFICIAL SEQUENCE
  Synthetic Construct
AKAHRK

SEQ ID NO: 6456 - protein, 6 aa, ARTIFICIAL SEQUENCE
  Synthetic Construct
AKAHSK

SEQ ID NO: 6457 - protein, 6 aa, ARTIFICIAL SEQUENCE
  Synthetic Construct
AKAHTK

SEQ ID NO: 6458 - protein, 6 aa, ARTIFICIAL SEQUENCE
  Synthetic Construct
AKAHYK

SEQ ID NO: 6459 - protein, 6 aa, ARTIFICIAL SEQUENCE
  Synthetic Construct
AKAIAK

SEQ ID NO: 6460 - protein, 6 aa, ARTIFICIAL SEQUENCE
  Synthetic Construct
AKAIDK

SEQ ID NO: 6461 - protein, 6 aa, ARTIFICIAL SEQUENCE
  Synthetic Construct
AKAIEK

SEQ ID NO: 6462 - protein, 6 aa, ARTIFICIAL SEQUENCE
  Synthetic Construct
AKAIFK

SEQ ID NO: 6463 - protein, 6 aa, ARTIFICIAL SEQUENCE
  Synthetic Construct
AKAIGK

SEQ ID NO: 6464 - protein, 6 aa, ARTIFICIAL SEQUENCE
  Synthetic Construct
AKAIHK

SEQ ID NO: 6465 - protein, 6 aa, ARTIFICIAL SEQUENCE
  Synthetic Construct
AKAIIK

SEQ ID NO: 6466 - protein, 6 aa, ARTIFICIAL SEQUENCE
  Synthetic Construct
AKAILK

SEQ ID NO: 6467 - protein, 6 aa, ARTIFICIAL SEQUENCE
  Synthetic Construct
AKAINK

SEQ ID NO: 6468 - protein, 6 aa, ARTIFICIAL SEQUENCE
  Synthetic Construct
AKAIQK

SEQ ID NO: 6469 - protein, 6 aa, ARTIFICIAL SEQUENCE
  Synthetic Construct
AKAIRK

SEQ ID NO: 6470 - protein, 6 aa, ARTIFICIAL SEQUENCE
  Synthetic Construct
AKAISK

SEQ ID NO: 6471 - protein, 6 aa, ARTIFICIAL SEQUENCE
  Synthetic Construct
AKAITK

SEQ ID NO: 6472 - protein, 6 aa, ARTIFICIAL SEQUENCE
  Synthetic Construct
AKAIYK

SEQ ID NO: 6473 - protein, 6 aa, ARTIFICIAL SEQUENCE
  Synthetic Construct
AKALAK

SEQ ID NO: 6474 - protein, 6 aa, ARTIFICIAL SEQUENCE
  Synthetic Construct
AKALDK

SEQ ID NO: 6475 - protein, 6 aa, ARTIFICIAL SEQUENCE
  Synthetic Construct
AKALEK

SEQ ID NO: 6476 - protein, 6 aa, ARTIFICIAL SEQUENCE
  Synthetic Construct
AKALFK

SEQ ID NO: 6477 - protein, 6 aa, ARTIFICIAL SEQUENCE
  Synthetic Construct
AKALGK

SEQ ID NO: 6478 - protein, 6 aa, ARTIFICIAL SEQUENCE
  Synthetic Construct
AKALHK

SEQ ID NO: 6479 - protein, 6 aa, ARTIFICIAL SEQUENCE
  Synthetic Construct
AKALIK

SEQ ID NO: 6480 - protein, 6 aa, ARTIFICIAL SEQUENCE
  Synthetic Construct
AKALLK

SEQ ID NO: 6481 - protein, 6 aa, ARTIFICIAL SEQUENCE
  Synthetic Construct
AKALNK

SEQ ID NO: 6482 - protein, 6 aa, ARTIFICIAL SEQUENCE
  Synthetic Construct
AKALQK

SEQ ID NO: 6483 - protein, 6 aa, ARTIFICIAL SEQUENCE
  Synthetic Construct
AKALRK

SEQ ID NO: 6484 - protein, 6 aa, ARTIFICIAL SEQUENCE
  Synthetic Construct
AKALSK

SEQ ID NO: 6485 - protein, 6 aa, ARTIFICIAL SEQUENCE
  Synthetic Construct
AKALTK

SEQ ID NO: 6486 - protein, 6 aa, ARTIFICIAL SEQUENCE
  Synthetic Construct
AKALYK

SEQ ID NO: 6487 - protein, 6 aa, ARTIFICIAL SEQUENCE
  Synthetic Construct
AKANAK

SEQ ID NO: 6488 - protein, 6 aa, ARTIFICIAL SEQUENCE
  Synthetic Construct
AKANDK

SEQ ID NO: 6489 - protein, 6 aa, ARTIFICIAL SEQUENCE
  Synthetic Construct
AKANEK

SEQ ID NO: 6490 - protein, 6 aa, ARTIFICIAL SEQUENCE
  Synthetic Construct
AKANFK

SEQ ID NO: 6491 - protein, 6 aa, ARTIFICIAL SEQUENCE
  Synthetic Construct
AKANGK

SEQ ID NO: 6492 - protein, 6 aa, ARTIFICIAL SEQUENCE
  Synthetic Construct
AKANHK

SEQ ID NO: 6493 - protein, 6 aa, ARTIFICIAL SEQUENCE
  Synthetic Construct
AKANIK

SEQ ID NO: 6494 - protein, 6 aa, ARTIFICIAL SEQUENCE
  Synthetic Construct
AKANLK

SEQ ID NO: 6495 - protein, 6 aa, ARTIFICIAL SEQUENCE
  Synthetic Construct
AKANNK

SEQ ID NO: 6496 - protein, 6 aa, ARTIFICIAL SEQUENCE
  Synthetic Construct
AKANQK

SEQ ID NO: 6497 - protein, 6 aa, ARTIFICIAL SEQUENCE
  Synthetic Construct
AKANRK

SEQ ID NO: 6498 - protein, 6 aa, ARTIFICIAL SEQUENCE
  Synthetic Construct
AKANSK

SEQ ID NO: 6499 - protein, 6 aa, ARTIFICIAL SEQUENCE
  Synthetic Construct
AKANTK

SEQ ID NO: 6500 - protein, 6 aa, ARTIFICIAL SEQUENCE
  Synthetic Construct
AKANYK

SEQ ID NO: 6501 - protein, 6 aa, ARTIFICIAL SEQUENCE
  Synthetic Construct
AKAQAK

SEQ ID NO: 6502 - protein, 6 aa, ARTIFICIAL SEQUENCE
  Synthetic Construct
AKAQDK

SEQ ID NO: 6503 - protein, 6 aa, ARTIFICIAL SEQUENCE
  Synthetic Construct
AKAQEK

SEQ ID NO: 6504 - protein, 6 aa, ARTIFICIAL SEQUENCE
  Synthetic Construct
AKAQFK

SEQ ID NO: 6505 - protein, 6 aa, ARTIFICIAL SEQUENCE
  Synthetic Construct
AKAQGK

SEQ ID NO: 6506 - protein, 6 aa, ARTIFICIAL SEQUENCE
  Synthetic Construct
AKAQHK

SEQ ID NO: 6507 - protein, 6 aa, ARTIFICIAL SEQUENCE
  Synthetic Construct
AKAQIK

SEQ ID NO: 6508 - protein, 6 aa, ARTIFICIAL SEQUENCE
  Synthetic Construct
AKAQLK

SEQ ID NO: 6509 - protein, 6 aa, ARTIFICIAL SEQUENCE
  Synthetic Construct
AKAQNK

SEQ ID NO: 6510 - protein, 6 aa, ARTIFICIAL SEQUENCE
  Synthetic Construct
AKAQQK

SEQ ID NO: 6511 - protein, 6 aa, ARTIFICIAL SEQUENCE
  Synthetic Construct
AKAQRK

SEQ ID NO: 6512 - protein, 6 aa, ARTIFICIAL SEQUENCE
  Synthetic Construct
AKAQSK

SEQ ID NO: 6513 - protein, 6 aa, ARTIFICIAL SEQUENCE
  Synthetic Construct
AKAQTK

SEQ ID NO: 6514 - protein, 6 aa, ARTIFICIAL SEQUENCE
  Synthetic Construct
AKAQYK

SEQ ID NO: 6515 - protein, 6 aa, ARTIFICIAL SEQUENCE
  Synthetic Construct
AKARAK

SEQ ID NO: 6516 - protein, 6 aa, ARTIFICIAL SEQUENCE
  Synthetic Construct
AKARDK

SEQ ID NO: 6517 - protein, 6 aa, ARTIFICIAL SEQUENCE
  Synthetic Construct
AKAREK

SEQ ID NO: 6518 - protein, 6 aa, ARTIFICIAL SEQUENCE
  Synthetic Construct
AKARFK

SEQ ID NO: 6519 - protein, 6 aa, ARTIFICIAL SEQUENCE
  Synthetic Construct
AKARGK

SEQ ID NO: 6520 - protein, 6 aa, ARTIFICIAL SEQUENCE
  Synthetic Construct
AKARHK

SEQ ID NO: 6521 - protein, 6 aa, ARTIFICIAL SEQUENCE
  Synthetic Construct
AKARIK

SEQ ID NO: 6522 - protein, 6 aa, ARTIFICIAL SEQUENCE
  Synthetic Construct
AKARLK

SEQ ID NO: 6523 - protein, 6 aa, ARTIFICIAL SEQUENCE
  Synthetic Construct
AKARNK

SEQ ID NO: 6524 - protein, 6 aa, ARTIFICIAL SEQUENCE
  Synthetic Construct
AKARQK

SEQ ID NO: 6525 - protein, 6 aa, ARTIFICIAL SEQUENCE
  Synthetic Construct
AKARRK

SEQ ID NO: 6526 - protein, 6 aa, ARTIFICIAL SEQUENCE
  Synthetic Construct
AKARSK

SEQ ID NO: 6527 - protein, 6 aa, ARTIFICIAL SEQUENCE
  Synthetic Construct
AKARTK

SEQ ID NO: 6528 - protein, 6 aa, ARTIFICIAL SEQUENCE
  Synthetic Construct
AKARYK

SEQ ID NO: 6529 - protein, 6 aa, ARTIFICIAL SEQUENCE
  Synthetic Construct
AKASAK

SEQ ID NO: 6530 - protein, 6 aa, ARTIFICIAL SEQUENCE
  Synthetic Construct
AKASDK

SEQ ID NO: 6531 - protein, 6 aa, ARTIFICIAL SEQUENCE
  Synthetic Construct
AKASEK

SEQ ID NO: 6532 - protein, 6 aa, ARTIFICIAL SEQUENCE
  Synthetic Construct
AKASFK

SEQ ID NO: 6533 - protein, 6 aa, ARTIFICIAL SEQUENCE
  Synthetic Construct
AKASGK

SEQ ID NO: 6534 - protein, 6 aa, ARTIFICIAL SEQUENCE
  Synthetic Construct
AKASHK

SEQ ID NO: 6535 - protein, 6 aa, ARTIFICIAL SEQUENCE
  Synthetic Construct
AKASIK

SEQ ID NO: 6536 - protein, 6 aa, ARTIFICIAL SEQUENCE
  Synthetic Construct
AKASLK

SEQ ID NO: 6537 - protein, 6 aa, ARTIFICIAL SEQUENCE
  Synthetic Construct
AKASNK

SEQ ID NO: 6538 - protein, 6 aa, ARTIFICIAL SEQUENCE
  Synthetic Construct
AKASQK

SEQ ID NO: 6539 - protein, 6 aa, ARTIFICIAL SEQUENCE
  Synthetic Construct
AKASRK

SEQ ID NO: 6540 - protein, 6 aa, ARTIFICIAL SEQUENCE
  Synthetic Construct
AKASSK

SEQ ID NO: 6541 - protein, 6 aa, ARTIFICIAL SEQUENCE
  Synthetic Construct
AKASTK

SEQ ID NO: 6542 - protein, 6 aa, ARTIFICIAL SEQUENCE
  Synthetic Construct
AKASYK

SEQ ID NO: 6543 - protein, 6 aa, ARTIFICIAL SEQUENCE
  Synthetic Construct
AKATAK

SEQ ID NO: 6544 - protein, 6 aa, ARTIFICIAL SEQUENCE
  Synthetic Construct
AKATDK

SEQ ID NO: 6545 - protein, 6 aa, ARTIFICIAL SEQUENCE
  Synthetic Construct
AKATEK

SEQ ID NO: 6546 - protein, 6 aa, ARTIFICIAL SEQUENCE
  Synthetic Construct
AKATFK

SEQ ID NO: 6547 - protein, 6 aa, ARTIFICIAL SEQUENCE
  Synthetic Construct
AKATGK

SEQ ID NO: 6548 - protein, 6 aa, ARTIFICIAL SEQUENCE
  Synthetic Construct
AKATHK

SEQ ID NO: 6549 - protein, 6 aa, ARTIFICIAL SEQUENCE
  Synthetic Construct
AKATIK

SEQ ID NO: 6550 - protein, 6 aa, ARTIFICIAL SEQUENCE
  Synthetic Construct
AKATLK

SEQ ID NO: 6551 - protein, 6 aa, ARTIFICIAL SEQUENCE
  Synthetic Construct
AKATNK

SEQ ID NO: 6552 - protein, 6 aa, ARTIFICIAL SEQUENCE
  Synthetic Construct
AKATQK

SEQ ID NO: 6553 - protein, 6 aa, ARTIFICIAL SEQUENCE
  Synthetic Construct
AKATRK

SEQ ID NO: 6554 - protein, 6 aa, ARTIFICIAL SEQUENCE
  Synthetic Construct
AKATSK

SEQ ID NO: 6555 - protein, 6 aa, ARTIFICIAL SEQUENCE
  Synthetic Construct
AKATTK

SEQ ID NO: 6556 - protein, 6 aa, ARTIFICIAL SEQUENCE
  Synthetic Construct
AKATYK

SEQ ID NO: 6557 - protein, 6 aa, ARTIFICIAL SEQUENCE
  Synthetic Construct
AKAYAK

SEQ ID NO: 6558 - protein, 6 aa, ARTIFICIAL SEQUENCE
  Synthetic Construct
AKAYDK

SEQ ID NO: 6559 - protein, 6 aa, ARTIFICIAL SEQUENCE
  Synthetic Construct
AKAYEK

SEQ ID NO: 6560 - protein, 6 aa, ARTIFICIAL SEQUENCE
  Synthetic Construct
AKAYFK

SEQ ID NO: 6561 - protein, 6 aa, ARTIFICIAL SEQUENCE
  Synthetic Construct
AKAYGK

SEQ ID NO: 6562 - protein, 6 aa, ARTIFICIAL SEQUENCE
  Synthetic Construct
AKAYHK

SEQ ID NO: 6563 - protein, 6 aa, ARTIFICIAL SEQUENCE
  Synthetic Construct
AKAYIK

SEQ ID NO: 6564 - protein, 6 aa, ARTIFICIAL SEQUENCE
  Synthetic Construct
AKAYLK

SEQ ID NO: 6565 - protein, 6 aa, ARTIFICIAL SEQUENCE
  Synthetic Construct
AKAYNK

SEQ ID NO: 6566 - protein, 6 aa, ARTIFICIAL SEQUENCE
  Synthetic Construct
AKAYQK

SEQ ID NO: 6567 - protein, 6 aa, ARTIFICIAL SEQUENCE
  Synthetic Construct
AKAYRK

SEQ ID NO: 6568 - protein, 6 aa, ARTIFICIAL SEQUENCE
  Synthetic Construct
AKAYSK

SEQ ID NO: 6569 - protein, 6 aa, ARTIFICIAL SEQUENCE
  Synthetic Construct
AKAYTK

SEQ ID NO: 6570 - protein, 6 aa, ARTIFICIAL SEQUENCE
  Synthetic Construct
AKAYYK

SEQ ID NO: 6571 - protein, 6 aa, ARTIFICIAL SEQUENCE
  Synthetic Construct
AKDAAK

SEQ ID NO: 6572 - protein, 6 aa, ARTIFICIAL SEQUENCE
  Synthetic Construct
AKDADK

SEQ ID NO: 6573 - protein, 6 aa, ARTIFICIAL SEQUENCE
  Synthetic Construct
AKDAEK

SEQ ID NO: 6574 - protein, 6 aa, ARTIFICIAL SEQUENCE
  Synthetic Construct
AKDAFK

SEQ ID NO: 6575 - protein, 6 aa, ARTIFICIAL SEQUENCE
  Synthetic Construct
AKDAGK

SEQ ID NO: 6576 - protein, 6 aa, ARTIFICIAL SEQUENCE
  Synthetic Construct
AKDAHK

SEQ ID NO: 6577 - protein, 6 aa, ARTIFICIAL SEQUENCE
  Synthetic Construct
AKDAIK

SEQ ID NO: 6578 - protein, 6 aa, ARTIFICIAL SEQUENCE
  Synthetic Construct
AKDALK

SEQ ID NO: 6579 - protein, 6 aa, ARTIFICIAL SEQUENCE
  Synthetic Construct
AKDANK

SEQ ID NO: 6580 - protein, 6 aa, ARTIFICIAL SEQUENCE
  Synthetic Construct
AKDAQK

SEQ ID NO: 6581 - protein, 6 aa, ARTIFICIAL SEQUENCE
  Synthetic Construct
AKDARK

SEQ ID NO: 6582 - protein, 6 aa, ARTIFICIAL SEQUENCE
  Synthetic Construct
AKDASK

SEQ ID NO: 6583 - protein, 6 aa, ARTIFICIAL SEQUENCE
  Synthetic Construct
AKDATK

SEQ ID NO: 6584 - protein, 6 aa, ARTIFICIAL SEQUENCE
  Synthetic Construct
AKDAYK

SEQ ID NO: 6585 - protein, 6 aa, ARTIFICIAL SEQUENCE
  Synthetic Construct
AKDDAK

SEQ ID NO: 6586 - protein, 6 aa, ARTIFICIAL SEQUENCE
  Synthetic Construct
AKDDDK

SEQ ID NO: 6587 - protein, 6 aa, ARTIFICIAL SEQUENCE
  Synthetic Construct
AKDDEK

SEQ ID NO: 6588 - protein, 6 aa, ARTIFICIAL SEQUENCE
  Synthetic Construct
AKDDFK

SEQ ID NO: 6589 - protein, 6 aa, ARTIFICIAL SEQUENCE
  Synthetic Construct
AKDDGK

SEQ ID NO: 6590 - protein, 6 aa, ARTIFICIAL SEQUENCE
  Synthetic Construct
AKDDHK

SEQ ID NO: 6591 - protein, 6 aa, ARTIFICIAL SEQUENCE
  Synthetic Construct
AKDDIK

SEQ ID NO: 6592 - protein, 6 aa, ARTIFICIAL SEQUENCE
  Synthetic Construct
AKDDLK

SEQ ID NO: 6593 - protein, 6 aa, ARTIFICIAL SEQUENCE
  Synthetic Construct
AKDDNK

SEQ ID NO: 6594 - protein, 6 aa, ARTIFICIAL SEQUENCE
  Synthetic Construct
AKDDQK

SEQ ID NO: 6595 - protein, 6 aa, ARTIFICIAL SEQUENCE
  Synthetic Construct
AKDDRK

SEQ ID NO: 6596 - protein, 6 aa, ARTIFICIAL SEQUENCE
  Synthetic Construct
AKDDSK

SEQ ID NO: 6597 - protein, 6 aa, ARTIFICIAL SEQUENCE
  Synthetic Construct
AKDDTK

SEQ ID NO: 6598 - protein, 6 aa, ARTIFICIAL SEQUENCE
  Synthetic Construct
AKDDYK

SEQ ID NO: 6599 - protein, 6 aa, ARTIFICIAL SEQUENCE
  Synthetic Construct
AKDEAK

SEQ ID NO: 6600 - protein, 6 aa, ARTIFICIAL SEQUENCE
  Synthetic Construct
AKDEDK

SEQ ID NO: 6601 - protein, 6 aa, ARTIFICIAL SEQUENCE
  Synthetic Construct
AKDEEK

SEQ ID NO: 6602 - protein, 6 aa, ARTIFICIAL SEQUENCE
  Synthetic Construct
AKDEFK

SEQ ID NO: 6603 - protein, 6 aa, ARTIFICIAL SEQUENCE
  Synthetic Construct
AKDEGK

SEQ ID NO: 6604 - protein, 6 aa, ARTIFICIAL SEQUENCE
  Synthetic Construct
AKDEHK

SEQ ID NO: 6605 - protein, 6 aa, ARTIFICIAL SEQUENCE
  Synthetic Construct
AKDEIK

SEQ ID NO: 6606 - protein, 6 aa, ARTIFICIAL SEQUENCE
  Synthetic Construct
AKDELK

SEQ ID NO: 6607 - protein, 6 aa, ARTIFICIAL SEQUENCE
  Synthetic Construct
AKDENK

SEQ ID NO: 6608 - protein, 6 aa, ARTIFICIAL SEQUENCE
  Synthetic Construct
AKDEQK

SEQ ID NO: 6609 - protein, 6 aa, ARTIFICIAL SEQUENCE
  Synthetic Construct
AKDERK

SEQ ID NO: 6610 - protein, 6 aa, ARTIFICIAL SEQUENCE
  Synthetic Construct
AKDESK

SEQ ID NO: 6611 - protein, 6 aa, ARTIFICIAL SEQUENCE
  Synthetic Construct
AKDETK

SEQ ID NO: 6612 - protein, 6 aa, ARTIFICIAL SEQUENCE
  Synthetic Construct
AKDEYK

SEQ ID NO: 6613 - protein, 6 aa, ARTIFICIAL SEQUENCE
  Synthetic Construct
AKDFAK

SEQ ID NO: 6614 - protein, 6 aa, ARTIFICIAL SEQUENCE
  Synthetic Construct
AKDFDK

SEQ ID NO: 6615 - protein, 6 aa, ARTIFICIAL SEQUENCE
  Synthetic Construct
AKDFEK

SEQ ID NO: 6616 - protein, 6 aa, ARTIFICIAL SEQUENCE
  Synthetic Construct
AKDFFK

SEQ ID NO: 6617 - protein, 6 aa, ARTIFICIAL SEQUENCE
  Synthetic Construct
AKDFGK

SEQ ID NO: 6618 - protein, 6 aa, ARTIFICIAL SEQUENCE
  Synthetic Construct
AKDFHK

SEQ ID NO: 6619 - protein, 6 aa, ARTIFICIAL SEQUENCE
  Synthetic Construct
AKDFIK

SEQ ID NO: 6620 - protein, 6 aa, ARTIFICIAL SEQUENCE
  Synthetic Construct
AKDFLK

SEQ ID NO: 6621 - protein, 6 aa, ARTIFICIAL SEQUENCE
  Synthetic Construct
AKDFNK

SEQ ID NO: 6622 - protein, 6 aa, ARTIFICIAL SEQUENCE
  Synthetic Construct
AKDFQK

SEQ ID NO: 6623 - protein, 6 aa, ARTIFICIAL SEQUENCE
  Synthetic Construct
AKDFRK

SEQ ID NO: 6624 - protein, 6 aa, ARTIFICIAL SEQUENCE
  Synthetic Construct
AKDFSK

SEQ ID NO: 6625 - protein, 6 aa, ARTIFICIAL SEQUENCE
  Synthetic Construct
AKDFTK

SEQ ID NO: 6626 - protein, 6 aa, ARTIFICIAL SEQUENCE
  Synthetic Construct
AKDFYK

SEQ ID NO: 6627 - protein, 6 aa, ARTIFICIAL SEQUENCE
  Synthetic Construct
AKDGAK

SEQ ID NO: 6628 - protein, 6 aa, ARTIFICIAL SEQUENCE
  Synthetic Construct
AKDGDK

SEQ ID NO: 6629 - protein, 6 aa, ARTIFICIAL SEQUENCE
  Synthetic Construct
AKDGEK

SEQ ID NO: 6630 - protein, 6 aa, ARTIFICIAL SEQUENCE
  Synthetic Construct
AKDGFK

SEQ ID NO: 6631 - protein, 6 aa, ARTIFICIAL SEQUENCE
  Synthetic Construct
AKDGGK

SEQ ID NO: 6632 - protein, 6 aa, ARTIFICIAL SEQUENCE
  Synthetic Construct
AKDGHK

SEQ ID NO: 6633 - protein, 6 aa, ARTIFICIAL SEQUENCE
  Synthetic Construct
AKDGIK

SEQ ID NO: 6634 - protein, 6 aa, ARTIFICIAL SEQUENCE
  Synthetic Construct
AKDGLK

SEQ ID NO: 6635 - protein, 6 aa, ARTIFICIAL SEQUENCE
  Synthetic Construct
AKDGNK

SEQ ID NO: 6636 - protein, 6 aa, ARTIFICIAL SEQUENCE
  Synthetic Construct
AKDGQK

SEQ ID NO: 6637 - protein, 6 aa, ARTIFICIAL SEQUENCE
  Synthetic Construct
AKDGRK

SEQ ID NO: 6638 - protein, 6 aa, ARTIFICIAL SEQUENCE
  Synthetic Construct
AKDGSK

SEQ ID NO: 6639 - protein, 6 aa, ARTIFICIAL SEQUENCE
  Synthetic Construct
AKDGTK

SEQ ID NO: 6640 - protein, 6 aa, ARTIFICIAL SEQUENCE
  Synthetic Construct
AKDGYK

SEQ ID NO: 6641 - protein, 6 aa, ARTIFICIAL SEQUENCE
  Synthetic Construct
AKDHAK

SEQ ID NO: 6642 - protein, 6 aa, ARTIFICIAL SEQUENCE
  Synthetic Construct
AKDHDK

SEQ ID NO: 6643 - protein, 6 aa, ARTIFICIAL SEQUENCE
  Synthetic Construct
AKDHEK

SEQ ID NO: 6644 - protein, 6 aa, ARTIFICIAL SEQUENCE
  Synthetic Construct
AKDHFK

SEQ ID NO: 6645 - protein, 6 aa, ARTIFICIAL SEQUENCE
  Synthetic Construct
AKDHGK

SEQ ID NO: 6646 - protein, 6 aa, ARTIFICIAL SEQUENCE
  Synthetic Construct
AKDHHK

SEQ ID NO: 6647 - protein, 6 aa, ARTIFICIAL SEQUENCE
  Synthetic Construct
AKDHIK

SEQ ID NO: 6648 - protein, 6 aa, ARTIFICIAL SEQUENCE
  Synthetic Construct
AKDHLK

SEQ ID NO: 6649 - protein, 6 aa, ARTIFICIAL SEQUENCE
  Synthetic Construct
AKDHNK

SEQ ID NO: 6650 - protein, 6 aa, ARTIFICIAL SEQUENCE
  Synthetic Construct
AKDHQK

SEQ ID NO: 6651 - protein, 6 aa, ARTIFICIAL SEQUENCE
  Synthetic Construct
AKDHRK

SEQ ID NO: 6652 - protein, 6 aa, ARTIFICIAL SEQUENCE
  Synthetic Construct
AKDHSK

SEQ ID NO: 6653 - protein, 6 aa, ARTIFICIAL SEQUENCE
  Synthetic Construct
AKDHTK

SEQ ID NO: 6654 - protein, 6 aa, ARTIFICIAL SEQUENCE
  Synthetic Construct
AKDHYK

SEQ ID NO: 6655 - protein, 6 aa, ARTIFICIAL SEQUENCE
  Synthetic Construct
AKDIAK

SEQ ID NO: 6656 - protein, 6 aa, ARTIFICIAL SEQUENCE
  Synthetic Construct
AKDIDK

SEQ ID NO: 6657 - protein, 6 aa, ARTIFICIAL SEQUENCE
  Synthetic Construct
AKDIEK

SEQ ID NO: 6658 - protein, 6 aa, ARTIFICIAL SEQUENCE
  Synthetic Construct
AKDIFK

SEQ ID NO: 6659 - protein, 6 aa, ARTIFICIAL SEQUENCE
  Synthetic Construct
AKDIGK

SEQ ID NO: 6660 - protein, 6 aa, ARTIFICIAL SEQUENCE
  Synthetic Construct
AKDIHK

SEQ ID NO: 6661 - protein, 6 aa, ARTIFICIAL SEQUENCE
  Synthetic Construct
AKDIIK

SEQ ID NO: 6662 - protein, 6 aa, ARTIFICIAL SEQUENCE
  Synthetic Construct
AKDILK

SEQ ID NO: 6663 - protein, 6 aa, ARTIFICIAL SEQUENCE
  Synthetic Construct
AKDINK

SEQ ID NO: 6664 - protein, 6 aa, ARTIFICIAL SEQUENCE
  Synthetic Construct
AKDIQK

SEQ ID NO: 6665 - protein, 6 aa, ARTIFICIAL SEQUENCE
  Synthetic Construct
AKDIRK

SEQ ID NO: 6666 - protein, 6 aa, ARTIFICIAL SEQUENCE
  Synthetic Construct
AKDISK

SEQ ID NO: 6667 - protein, 6 aa, ARTIFICIAL SEQUENCE
  Synthetic Construct
AKDITK

SEQ ID NO: 6668 - protein, 6 aa, ARTIFICIAL SEQUENCE
  Synthetic Construct
AKDIYK

SEQ ID NO: 6669 - protein, 6 aa, ARTIFICIAL SEQUENCE
  Synthetic Construct
AKDLAK

SEQ ID NO: 6670 - protein, 6 aa, ARTIFICIAL SEQUENCE
  Synthetic Construct
AKDLDK

SEQ ID NO: 6671 - protein, 6 aa, ARTIFICIAL SEQUENCE
  Synthetic Construct
AKDLEK

SEQ ID NO: 6672 - protein, 6 aa, ARTIFICIAL SEQUENCE
  Synthetic Construct
AKDLFK

SEQ ID NO: 6673 - protein, 6 aa, ARTIFICIAL SEQUENCE
  Synthetic Construct
AKDLGK

SEQ ID NO: 6674 - protein, 6 aa, ARTIFICIAL SEQUENCE
  Synthetic Construct
AKDLHK

SEQ ID NO: 6675 - protein, 6 aa, ARTIFICIAL SEQUENCE
  Synthetic Construct
AKDLIK

SEQ ID NO: 6676 - protein, 6 aa, ARTIFICIAL SEQUENCE
  Synthetic Construct
AKDLLK

SEQ ID NO: 6677 - protein, 6 aa, ARTIFICIAL SEQUENCE
  Synthetic Construct
AKDLNK

SEQ ID NO: 6678 - protein, 6 aa, ARTIFICIAL SEQUENCE
  Synthetic Construct
AKDLQK

SEQ ID NO: 6679 - protein, 6 aa, ARTIFICIAL SEQUENCE
  Synthetic Construct
AKDLRK

SEQ ID NO: 6680 - protein, 6 aa, ARTIFICIAL SEQUENCE
  Synthetic Construct
AKDLSK

SEQ ID NO: 6681 - protein, 6 aa, ARTIFICIAL SEQUENCE
  Synthetic Construct
AKDLTK

SEQ ID NO: 6682 - protein, 6 aa, ARTIFICIAL SEQUENCE
  Synthetic Construct
AKDLYK

SEQ ID NO: 6683 - protein, 6 aa, ARTIFICIAL SEQUENCE
  Synthetic Construct
AKDNAK

SEQ ID NO: 6684 - protein, 6 aa, ARTIFICIAL SEQUENCE
  Synthetic Construct
AKDNDK

SEQ ID NO: 6685 - protein, 6 aa, ARTIFICIAL SEQUENCE
  Synthetic Construct
AKDNEK

SEQ ID NO: 6686 - protein, 6 aa, ARTIFICIAL SEQUENCE
  Synthetic Construct
AKDNFK

SEQ ID NO: 6687 - protein, 6 aa, ARTIFICIAL SEQUENCE
  Synthetic Construct
AKDNGK

SEQ ID NO: 6688 - protein, 6 aa, ARTIFICIAL SEQUENCE
  Synthetic Construct
AKDNHK

SEQ ID NO: 6689 - protein, 6 aa, ARTIFICIAL SEQUENCE
  Synthetic Construct
AKDNIK

SEQ ID NO: 6690 - protein, 6 aa, ARTIFICIAL SEQUENCE
  Synthetic Construct
AKDNLK

SEQ ID NO: 6691 - protein, 6 aa, ARTIFICIAL SEQUENCE
  Synthetic Construct
AKDNNK

SEQ ID NO: 6692 - protein, 6 aa, ARTIFICIAL SEQUENCE
  Synthetic Construct
AKDNQK

SEQ ID NO: 6693 - protein, 6 aa, ARTIFICIAL SEQUENCE
  Synthetic Construct
AKDNRK

SEQ ID NO: 6694 - protein, 6 aa, ARTIFICIAL SEQUENCE
  Synthetic Construct
AKDNSK

SEQ ID NO: 6695 - protein, 6 aa, ARTIFICIAL SEQUENCE
  Synthetic Construct
AKDNTK

SEQ ID NO: 6696 - protein, 6 aa, ARTIFICIAL SEQUENCE
  Synthetic Construct
AKDNYK

SEQ ID NO: 6697 - protein, 6 aa, ARTIFICIAL SEQUENCE
  Synthetic Construct
AKDQAK

SEQ ID NO: 6698 - protein, 6 aa, ARTIFICIAL SEQUENCE
  Synthetic Construct
AKDQDK

SEQ ID NO: 6699 - protein, 6 aa, ARTIFICIAL SEQUENCE
  Synthetic Construct
AKDQEK

SEQ ID NO: 6700 - protein, 6 aa, ARTIFICIAL SEQUENCE
  Synthetic Construct
AKDQFK

SEQ ID NO: 6701 - protein, 6 aa, ARTIFICIAL SEQUENCE
  Synthetic Construct
AKDQGK

SEQ ID NO: 6702 - protein, 6 aa, ARTIFICIAL SEQUENCE
  Synthetic Construct
AKDQHK

SEQ ID NO: 6703 - protein, 6 aa, ARTIFICIAL SEQUENCE
  Synthetic Construct
AKDQIK

SEQ ID NO: 6704 - protein, 6 aa, ARTIFICIAL SEQUENCE
  Synthetic Construct
AKDQLK

SEQ ID NO: 6705 - protein, 6 aa, ARTIFICIAL SEQUENCE
  Synthetic Construct
AKDQNK

SEQ ID NO: 6706 - protein, 6 aa, ARTIFICIAL SEQUENCE
  Synthetic Construct
AKDQQK

SEQ ID NO: 6707 - protein, 6 aa, ARTIFICIAL SEQUENCE
  Synthetic Construct
AKDQRK

SEQ ID NO: 6708 - protein, 6 aa, ARTIFICIAL SEQUENCE
  Synthetic Construct
AKDQSK

SEQ ID NO: 6709 - protein, 6 aa, ARTIFICIAL SEQUENCE
  Synthetic Construct
AKDQTK

SEQ ID NO: 6710 - protein, 6 aa, ARTIFICIAL SEQUENCE
  Synthetic Construct
AKDQYK

SEQ ID NO: 6711 - protein, 6 aa, ARTIFICIAL SEQUENCE
  Synthetic Construct
AKDRAK

SEQ ID NO: 6712 - protein, 6 aa, ARTIFICIAL SEQUENCE
  Synthetic Construct
AKDRDK

SEQ ID NO: 6713 - protein, 6 aa, ARTIFICIAL SEQUENCE
  Synthetic Construct
AKDREK

SEQ ID NO: 6714 - protein, 6 aa, ARTIFICIAL SEQUENCE
  Synthetic Construct
AKDRFK

SEQ ID NO: 6715 - protein, 6 aa, ARTIFICIAL SEQUENCE
  Synthetic Construct
AKDRGK

SEQ ID NO: 6716 - protein, 6 aa, ARTIFICIAL SEQUENCE
  Synthetic Construct
AKDRHK

SEQ ID NO: 6717 - protein, 6 aa, ARTIFICIAL SEQUENCE
  Synthetic Construct
AKDRIK

SEQ ID NO: 6718 - protein, 6 aa, ARTIFICIAL SEQUENCE
  Synthetic Construct
AKDRLK

SEQ ID NO: 6719 - protein, 6 aa, ARTIFICIAL SEQUENCE
  Synthetic Construct
AKDRNK

SEQ ID NO: 6720 - protein, 6 aa, ARTIFICIAL SEQUENCE
  Synthetic Construct
AKDRQK

SEQ ID NO: 6721 - protein, 6 aa, ARTIFICIAL SEQUENCE
  Synthetic Construct
AKDRRK

SEQ ID NO: 6722 - protein, 6 aa, ARTIFICIAL SEQUENCE
  Synthetic Construct
AKDRSK

SEQ ID NO: 6723 - protein, 6 aa, ARTIFICIAL SEQUENCE
  Synthetic Construct
AKDRTK

SEQ ID NO: 6724 - protein, 6 aa, ARTIFICIAL SEQUENCE
  Synthetic Construct
AKDRYK

SEQ ID NO: 6725 - protein, 6 aa, ARTIFICIAL SEQUENCE
  Synthetic Construct
AKDSAK

SEQ ID NO: 6726 - protein, 6 aa, ARTIFICIAL SEQUENCE
  Synthetic Construct
AKDSDK

SEQ ID NO: 6727 - protein, 6 aa, ARTIFICIAL SEQUENCE
  Synthetic Construct
AKDSEK

SEQ ID NO: 6728 - protein, 6 aa, ARTIFICIAL SEQUENCE
  Synthetic Construct
AKDSFK

SEQ ID NO: 6729 - protein, 6 aa, ARTIFICIAL SEQUENCE
  Synthetic Construct
AKDSGK

SEQ ID NO: 6730 - protein, 6 aa, ARTIFICIAL SEQUENCE
  Synthetic Construct
AKDSHK

SEQ ID NO: 6731 - protein, 6 aa, ARTIFICIAL SEQUENCE
  Synthetic Construct
AKDSIK

SEQ ID NO: 6732 - protein, 6 aa, ARTIFICIAL SEQUENCE
  Synthetic Construct
AKDSLK

SEQ ID NO: 6733 - protein, 6 aa, ARTIFICIAL SEQUENCE
  Synthetic Construct
AKDSNK

SEQ ID NO: 6734 - protein, 6 aa, ARTIFICIAL SEQUENCE
  Synthetic Construct
AKDSQK

SEQ ID NO: 6735 - protein, 6 aa, ARTIFICIAL SEQUENCE
  Synthetic Construct
AKDSRK

SEQ ID NO: 6736 - protein, 6 aa, ARTIFICIAL SEQUENCE
  Synthetic Construct
AKDSSK

SEQ ID NO: 6737 - protein, 6 aa, ARTIFICIAL SEQUENCE
  Synthetic Construct
AKDSTK

SEQ ID NO: 6738 - protein, 6 aa, ARTIFICIAL SEQUENCE
  Synthetic Construct
AKDSYK

SEQ ID NO: 6739 - protein, 6 aa, ARTIFICIAL SEQUENCE
  Synthetic Construct
AKDTAK

SEQ ID NO: 6740 - protein, 6 aa, ARTIFICIAL SEQUENCE
  Synthetic Construct
AKDTDK

SEQ ID NO: 6741 - protein, 6 aa, ARTIFICIAL SEQUENCE
  Synthetic Construct
AKDTEK

SEQ ID NO: 6742 - protein, 6 aa, ARTIFICIAL SEQUENCE
  Synthetic Construct
AKDTFK

SEQ ID NO: 6743 - protein, 6 aa, ARTIFICIAL SEQUENCE
  Synthetic Construct
AKDTGK

SEQ ID NO: 6744 - protein, 6 aa, ARTIFICIAL SEQUENCE
  Synthetic Construct
AKDTHK

SEQ ID NO: 6745 - protein, 6 aa, ARTIFICIAL SEQUENCE
  Synthetic Construct
AKDTIK

SEQ ID NO: 6746 - protein, 6 aa, ARTIFICIAL SEQUENCE
  Synthetic Construct
AKDTLK

SEQ ID NO: 6747 - protein, 6 aa, ARTIFICIAL SEQUENCE
  Synthetic Construct
AKDTNK

SEQ ID NO: 6748 - protein, 6 aa, ARTIFICIAL SEQUENCE
  Synthetic Construct
AKDTQK

SEQ ID NO: 6749 - protein, 6 aa, ARTIFICIAL SEQUENCE
  Synthetic Construct
AKDTRK

SEQ ID NO: 6750 - protein, 6 aa, ARTIFICIAL SEQUENCE
  Synthetic Construct
AKDTSK

SEQ ID NO: 6751 - protein, 6 aa, ARTIFICIAL SEQUENCE
  Synthetic Construct
AKDTTK

SEQ ID NO: 6752 - protein, 6 aa, ARTIFICIAL SEQUENCE
  Synthetic Construct
AKDTYK

SEQ ID NO: 6753 - protein, 6 aa, ARTIFICIAL SEQUENCE
  Synthetic Construct
AKDYAK

SEQ ID NO: 6754 - protein, 6 aa, ARTIFICIAL SEQUENCE
  Synthetic Construct
AKDYDK

SEQ ID NO: 6755 - protein, 6 aa, ARTIFICIAL SEQUENCE
  Synthetic Construct
AKDYEK

SEQ ID NO: 6756 - protein, 6 aa, ARTIFICIAL SEQUENCE
  Synthetic Construct
AKDYFK

SEQ ID NO: 6757 - protein, 6 aa, ARTIFICIAL SEQUENCE
  Synthetic Construct
AKDYGK

SEQ ID NO: 6758 - protein, 6 aa, ARTIFICIAL SEQUENCE
  Synthetic Construct
AKDYHK

SEQ ID NO: 6759 - protein, 6 aa, ARTIFICIAL SEQUENCE
  Synthetic Construct
AKDYIK

SEQ ID NO: 6760 - protein, 6 aa, ARTIFICIAL SEQUENCE
  Synthetic Construct
AKDYLK

SEQ ID NO: 6761 - protein, 6 aa, ARTIFICIAL SEQUENCE
  Synthetic Construct
AKDYNK

SEQ ID NO: 6762 - protein, 6 aa, ARTIFICIAL SEQUENCE
  Synthetic Construct
AKDYQK

SEQ ID NO: 6763 - protein, 6 aa, ARTIFICIAL SEQUENCE
  Synthetic Construct
AKDYRK

SEQ ID NO: 6764 - protein, 6 aa, ARTIFICIAL SEQUENCE
  Synthetic Construct
AKDYSK

SEQ ID NO: 6765 - protein, 6 aa, ARTIFICIAL SEQUENCE
  Synthetic Construct
AKDYTK

SEQ ID NO: 6766 - protein, 6 aa, ARTIFICIAL SEQUENCE
  Synthetic Construct
AKDYYK

SEQ ID NO: 6767 - protein, 6 aa, ARTIFICIAL SEQUENCE
  Synthetic Construct
AKEAAK

SEQ ID NO: 6768 - protein, 6 aa, ARTIFICIAL SEQUENCE
  Synthetic Construct
AKEADK

SEQ ID NO: 6769 - protein, 6 aa, ARTIFICIAL SEQUENCE
  Synthetic Construct
AKEAEK

SEQ ID NO: 6770 - protein, 6 aa, ARTIFICIAL SEQUENCE
  Synthetic Construct
AKEAFK

SEQ ID NO: 6771 - protein, 6 aa, ARTIFICIAL SEQUENCE
  Synthetic Construct
AKEAGK

SEQ ID NO: 6772 - protein, 6 aa, ARTIFICIAL SEQUENCE
  Synthetic Construct
AKEAHK

SEQ ID NO: 6773 - protein, 6 aa, ARTIFICIAL SEQUENCE
  Synthetic Construct
AKEAIK

SEQ ID NO: 6774 - protein, 6 aa, ARTIFICIAL SEQUENCE
  Synthetic Construct
AKEALK

SEQ ID NO: 6775 - protein, 6 aa, ARTIFICIAL SEQUENCE
  Synthetic Construct
AKEANK

SEQ ID NO: 6776 - protein, 6 aa, ARTIFICIAL SEQUENCE
  Synthetic Construct
AKEAQK

SEQ ID NO: 6777 - protein, 6 aa, ARTIFICIAL SEQUENCE
  Synthetic Construct
AKEARK

SEQ ID NO: 6778 - protein, 6 aa, ARTIFICIAL SEQUENCE
  Synthetic Construct
AKEASK

SEQ ID NO: 6779 - protein, 6 aa, ARTIFICIAL SEQUENCE
  Synthetic Construct
AKEATK

SEQ ID NO: 6780 - protein, 6 aa, ARTIFICIAL SEQUENCE
  Synthetic Construct
AKEAYK

SEQ ID NO: 6781 - protein, 6 aa, ARTIFICIAL SEQUENCE
  Synthetic Construct
AKEDAK

SEQ ID NO: 6782 - protein, 6 aa, ARTIFICIAL SEQUENCE
  Synthetic Construct
AKEDDK

SEQ ID NO: 6783 - protein, 6 aa, ARTIFICIAL SEQUENCE
  Synthetic Construct
AKEDEK

SEQ ID NO: 6784 - protein, 6 aa, ARTIFICIAL SEQUENCE
  Synthetic Construct
AKEDFK

SEQ ID NO: 6785 - protein, 6 aa, ARTIFICIAL SEQUENCE
  Synthetic Construct
AKEDGK

SEQ ID NO: 6786 - protein, 6 aa, ARTIFICIAL SEQUENCE
  Synthetic Construct
AKEDHK

SEQ ID NO: 6787 - protein, 6 aa, ARTIFICIAL SEQUENCE
  Synthetic Construct
AKEDIK

SEQ ID NO: 6788 - protein, 6 aa, ARTIFICIAL SEQUENCE
  Synthetic Construct
AKEDLK

SEQ ID NO: 6789 - protein, 6 aa, ARTIFICIAL SEQUENCE
  Synthetic Construct
AKEDNK

SEQ ID NO: 6790 - protein, 6 aa, ARTIFICIAL SEQUENCE
  Synthetic Construct
AKEDQK

SEQ ID NO: 6791 - protein, 6 aa, ARTIFICIAL SEQUENCE
  Synthetic Construct
AKEDRK

SEQ ID NO: 6792 - protein, 6 aa, ARTIFICIAL SEQUENCE
  Synthetic Construct
AKEDSK

SEQ ID NO: 6793 - protein, 6 aa, ARTIFICIAL SEQUENCE
  Synthetic Construct
AKEDTK

SEQ ID NO: 6794 - protein, 6 aa, ARTIFICIAL SEQUENCE
  Synthetic Construct
AKEDYK

SEQ ID NO: 6795 - protein, 6 aa, ARTIFICIAL SEQUENCE
  Synthetic Construct
AKEEAK

SEQ ID NO: 6796 - protein, 6 aa, ARTIFICIAL SEQUENCE
  Synthetic Construct
AKEEDK

SEQ ID NO: 6797 - protein, 6 aa, ARTIFICIAL SEQUENCE
  Synthetic Construct
AKEEEK

SEQ ID NO: 6798 - protein, 6 aa, ARTIFICIAL SEQUENCE
  Synthetic Construct
AKEEFK

SEQ ID NO: 6799 - protein, 6 aa, ARTIFICIAL SEQUENCE
  Synthetic Construct
AKEEGK

SEQ ID NO: 6800 - protein, 6 aa, ARTIFICIAL SEQUENCE
  Synthetic Construct
AKEEHK

SEQ ID NO: 6801 - protein, 6 aa, ARTIFICIAL SEQUENCE
  Synthetic Construct
AKEEIK

SEQ ID NO: 6802 - protein, 6 aa, ARTIFICIAL SEQUENCE
  Synthetic Construct
AKEELK

SEQ ID NO: 6803 - protein, 6 aa, ARTIFICIAL SEQUENCE
  Synthetic Construct
AKEENK

SEQ ID NO: 6804 - protein, 6 aa, ARTIFICIAL SEQUENCE
  Synthetic Construct
AKEEQK

SEQ ID NO: 6805 - protein, 6 aa, ARTIFICIAL SEQUENCE
  Synthetic Construct
AKEERK

SEQ ID NO: 6806 - protein, 6 aa, ARTIFICIAL SEQUENCE
  Synthetic Construct
AKEESK

SEQ ID NO: 6807 - protein, 6 aa, ARTIFICIAL SEQUENCE
  Synthetic Construct
AKEETK

SEQ ID NO: 6808 - protein, 6 aa, ARTIFICIAL SEQUENCE
  Synthetic Construct
AKEEYK

SEQ ID NO: 6809 - protein, 6 aa, ARTIFICIAL SEQUENCE
  Synthetic Construct
AKEFAK

SEQ ID NO: 6810 - protein, 6 aa, ARTIFICIAL SEQUENCE
  Synthetic Construct
AKEFDK

SEQ ID NO: 6811 - protein, 6 aa, ARTIFICIAL SEQUENCE
  Synthetic Construct
AKEFEK

SEQ ID NO: 6812 - protein, 6 aa, ARTIFICIAL SEQUENCE
  Synthetic Construct
AKEFFK

SEQ ID NO: 6813 - protein, 6 aa, ARTIFICIAL SEQUENCE
  Synthetic Construct
AKEFGK

SEQ ID NO: 6814 - protein, 6 aa, ARTIFICIAL SEQUENCE
  Synthetic Construct
AKEFHK

SEQ ID NO: 6815 - protein, 6 aa, ARTIFICIAL SEQUENCE
  Synthetic Construct
AKEFIK

SEQ ID NO: 6816 - protein, 6 aa, ARTIFICIAL SEQUENCE
  Synthetic Construct
AKEFLK

SEQ ID NO: 6817 - protein, 6 aa, ARTIFICIAL SEQUENCE
  Synthetic Construct
AKEFNK

SEQ ID NO: 6818 - protein, 6 aa, ARTIFICIAL SEQUENCE
  Synthetic Construct
AKEFQK

SEQ ID NO: 6819 - protein, 6 aa, ARTIFICIAL SEQUENCE
  Synthetic Construct
AKEFRK

SEQ ID NO: 6820 - protein, 6 aa, ARTIFICIAL SEQUENCE
  Synthetic Construct
AKEFSK

SEQ ID NO: 6821 - protein, 6 aa, ARTIFICIAL SEQUENCE
  Synthetic Construct
AKEFTK

SEQ ID NO: 6822 - protein, 6 aa, ARTIFICIAL SEQUENCE
  Synthetic Construct
AKEFYK

SEQ ID NO: 6823 - protein, 6 aa, ARTIFICIAL SEQUENCE
  Synthetic Construct
AKEGAK

SEQ ID NO: 6824 - protein, 6 aa, ARTIFICIAL SEQUENCE
  Synthetic Construct
AKEGDK

SEQ ID NO: 6825 - protein, 6 aa, ARTIFICIAL SEQUENCE
  Synthetic Construct
AKEGEK

SEQ ID NO: 6826 - protein, 6 aa, ARTIFICIAL SEQUENCE
  Synthetic Construct
AKEGFK

SEQ ID NO: 6827 - protein, 6 aa, ARTIFICIAL SEQUENCE
  Synthetic Construct
AKEGGK

SEQ ID NO: 6828 - protein, 6 aa, ARTIFICIAL SEQUENCE
  Synthetic Construct
AKEGHK

SEQ ID NO: 6829 - protein, 6 aa, ARTIFICIAL SEQUENCE
  Synthetic Construct
AKEGIK

SEQ ID NO: 6830 - protein, 6 aa, ARTIFICIAL SEQUENCE
  Synthetic Construct
AKEGLK

SEQ ID NO: 6831 - protein, 6 aa, ARTIFICIAL SEQUENCE
  Synthetic Construct
AKEGNK

SEQ ID NO: 6832 - protein, 6 aa, ARTIFICIAL SEQUENCE
  Synthetic Construct
AKEGQK

SEQ ID NO: 6833 - protein, 6 aa, ARTIFICIAL SEQUENCE
  Synthetic Construct
AKEGRK

SEQ ID NO: 6834 - protein, 6 aa, ARTIFICIAL SEQUENCE
  Synthetic Construct
AKEGSK

SEQ ID NO: 6835 - protein, 6 aa, ARTIFICIAL SEQUENCE
  Synthetic Construct
AKEGTK

SEQ ID NO: 6836 - protein, 6 aa, ARTIFICIAL SEQUENCE
  Synthetic Construct
AKEGYK

SEQ ID NO: 6837 - protein, 6 aa, ARTIFICIAL SEQUENCE
  Synthetic Construct
AKEHAK

SEQ ID NO: 6838 - protein, 6 aa, ARTIFICIAL SEQUENCE
  Synthetic Construct
AKEHDK

SEQ ID NO: 6839 - protein, 6 aa, ARTIFICIAL SEQUENCE
  Synthetic Construct
AKEHEK

SEQ ID NO: 6840 - protein, 6 aa, ARTIFICIAL SEQUENCE
  Synthetic Construct
AKEHFK

SEQ ID NO: 6841 - protein, 6 aa, ARTIFICIAL SEQUENCE
  Synthetic Construct
AKEHGK

SEQ ID NO: 6842 - protein, 6 aa, ARTIFICIAL SEQUENCE
  Synthetic Construct
AKEHHK

SEQ ID NO: 6843 - protein, 6 aa, ARTIFICIAL SEQUENCE
  Synthetic Construct
AKEHIK

SEQ ID NO: 6844 - protein, 6 aa, ARTIFICIAL SEQUENCE
  Synthetic Construct
AKEHLK

SEQ ID NO: 6845 - protein, 6 aa, ARTIFICIAL SEQUENCE
  Synthetic Construct
AKEHNK

SEQ ID NO: 6846 - protein, 6 aa, ARTIFICIAL SEQUENCE
  Synthetic Construct
AKEHQK

SEQ ID NO: 6847 - protein, 6 aa, ARTIFICIAL SEQUENCE
  Synthetic Construct
AKEHRK

SEQ ID NO: 6848 - protein, 6 aa, ARTIFICIAL SEQUENCE
  Synthetic Construct
AKEHSK

SEQ ID NO: 6849 - protein, 6 aa, ARTIFICIAL SEQUENCE
  Synthetic Construct
AKEHTK

SEQ ID NO: 6850 - protein, 6 aa, ARTIFICIAL SEQUENCE
  Synthetic Construct
AKEHYK

SEQ ID NO: 6851 - protein, 6 aa, ARTIFICIAL SEQUENCE
  Synthetic Construct
AKEIAK

SEQ ID NO: 6852 - protein, 6 aa, ARTIFICIAL SEQUENCE
  Synthetic Construct
AKEIDK

SEQ ID NO: 6853 - protein, 6 aa, ARTIFICIAL SEQUENCE
  Synthetic Construct
AKEIEK

SEQ ID NO: 6854 - protein, 6 aa, ARTIFICIAL SEQUENCE
  Synthetic Construct
AKEIFK

SEQ ID NO: 6855 - protein, 6 aa, ARTIFICIAL SEQUENCE
  Synthetic Construct
AKEIGK

SEQ ID NO: 6856 - protein, 6 aa, ARTIFICIAL SEQUENCE
  Synthetic Construct
AKEIHK

SEQ ID NO: 6857 - protein, 6 aa, ARTIFICIAL SEQUENCE
  Synthetic Construct
AKEIIK

SEQ ID NO: 6858 - protein, 6 aa, ARTIFICIAL SEQUENCE
  Synthetic Construct
AKEILK

SEQ ID NO: 6859 - protein, 6 aa, ARTIFICIAL SEQUENCE
  Synthetic Construct
AKEINK

SEQ ID NO: 6860 - protein, 6 aa, ARTIFICIAL SEQUENCE
  Synthetic Construct
AKEIQK

SEQ ID NO: 6861 - protein, 6 aa, ARTIFICIAL SEQUENCE
  Synthetic Construct
AKEIRK

SEQ ID NO: 6862 - protein, 6 aa, ARTIFICIAL SEQUENCE
  Synthetic Construct
AKEISK

SEQ ID NO: 6863 - protein, 6 aa, ARTIFICIAL SEQUENCE
  Synthetic Construct
AKEITK

SEQ ID NO: 6864 - protein, 6 aa, ARTIFICIAL SEQUENCE
  Synthetic Construct
AKEIYK

SEQ ID NO: 6865 - protein, 6 aa, ARTIFICIAL SEQUENCE
  Synthetic Construct
AKELAK

SEQ ID NO: 6866 - protein, 6 aa, ARTIFICIAL SEQUENCE
  Synthetic Construct
AKELDK

SEQ ID NO: 6867 - protein, 6 aa, ARTIFICIAL SEQUENCE
  Synthetic Construct
AKELEK

SEQ ID NO: 6868 - protein, 6 aa, ARTIFICIAL SEQUENCE
  Synthetic Construct
AKELFK

SEQ ID NO: 6869 - protein, 6 aa, ARTIFICIAL SEQUENCE
  Synthetic Construct
AKELGK

SEQ ID NO: 6870 - protein, 6 aa, ARTIFICIAL SEQUENCE
  Synthetic Construct
AKELHK

SEQ ID NO: 6871 - protein, 6 aa, ARTIFICIAL SEQUENCE
  Synthetic Construct
AKELIK

SEQ ID NO: 6872 - protein, 6 aa, ARTIFICIAL SEQUENCE
  Synthetic Construct
AKELLK

SEQ ID NO: 6873 - protein, 6 aa, ARTIFICIAL SEQUENCE
  Synthetic Construct
AKELNK

SEQ ID NO: 6874 - protein, 6 aa, ARTIFICIAL SEQUENCE
  Synthetic Construct
AKELQK

SEQ ID NO: 6875 - protein, 6 aa, ARTIFICIAL SEQUENCE
  Synthetic Construct
AKELRK

SEQ ID NO: 6876 - protein, 6 aa, ARTIFICIAL SEQUENCE
  Synthetic Construct
AKELSK

SEQ ID NO: 6877 - protein, 6 aa, ARTIFICIAL SEQUENCE
  Synthetic Construct
AKELTK

SEQ ID NO: 6878 - protein, 6 aa, ARTIFICIAL SEQUENCE
  Synthetic Construct
AKELYK

SEQ ID NO: 6879 - protein, 6 aa, ARTIFICIAL SEQUENCE
  Synthetic Construct
AKENAK

SEQ ID NO: 6880 - protein, 6 aa, ARTIFICIAL SEQUENCE
  Synthetic Construct
AKENDK

SEQ ID NO: 6881 - protein, 6 aa, ARTIFICIAL SEQUENCE
  Synthetic Construct
AKENEK

SEQ ID NO: 6882 - protein, 6 aa, ARTIFICIAL SEQUENCE
  Synthetic Construct
AKENFK

SEQ ID NO: 6883 - protein, 6 aa, ARTIFICIAL SEQUENCE
  Synthetic Construct
AKENGK

SEQ ID NO: 6884 - protein, 6 aa, ARTIFICIAL SEQUENCE
  Synthetic Construct
AKENHK

SEQ ID NO: 6885 - protein, 6 aa, ARTIFICIAL SEQUENCE
  Synthetic Construct
AKENIK

SEQ ID NO: 6886 - protein, 6 aa, ARTIFICIAL SEQUENCE
  Synthetic Construct
AKENLK

SEQ ID NO: 6887 - protein, 6 aa, ARTIFICIAL SEQUENCE
  Synthetic Construct
AKENNK

SEQ ID NO: 6888 - protein, 6 aa, ARTIFICIAL SEQUENCE
  Synthetic Construct
AKENQK

SEQ ID NO: 6889 - protein, 6 aa, ARTIFICIAL SEQUENCE
  Synthetic Construct
AKENRK

SEQ ID NO: 6890 - protein, 6 aa, ARTIFICIAL SEQUENCE
  Synthetic Construct
AKENSK

SEQ ID NO: 6891 - protein, 6 aa, ARTIFICIAL SEQUENCE
  Synthetic Construct
AKENTK

SEQ ID NO: 6892 - protein, 6 aa, ARTIFICIAL SEQUENCE
  Synthetic Construct
AKENYK

SEQ ID NO: 6893 - protein, 6 aa, ARTIFICIAL SEQUENCE
  Synthetic Construct
AKEQAK

SEQ ID NO: 6894 - protein, 6 aa, ARTIFICIAL SEQUENCE
  Synthetic Construct
AKEQDK

SEQ ID NO: 6895 - protein, 6 aa, ARTIFICIAL SEQUENCE
  Synthetic Construct
AKEQEK

SEQ ID NO: 6896 - protein, 6 aa, ARTIFICIAL SEQUENCE
  Synthetic Construct
AKEQFK

SEQ ID NO: 6897 - protein, 6 aa, ARTIFICIAL SEQUENCE
  Synthetic Construct
AKEQGK

SEQ ID NO: 6898 - protein, 6 aa, ARTIFICIAL SEQUENCE
  Synthetic Construct
AKEQHK

SEQ ID NO: 6899 - protein, 6 aa, ARTIFICIAL SEQUENCE
  Synthetic Construct
AKEQIK

SEQ ID NO: 6900 - protein, 6 aa, ARTIFICIAL SEQUENCE
  Synthetic Construct
AKEQLK

SEQ ID NO: 6901 - protein, 6 aa, ARTIFICIAL SEQUENCE
  Synthetic Construct
AKEQNK

SEQ ID NO: 6902 - protein, 6 aa, ARTIFICIAL SEQUENCE
  Synthetic Construct
AKEQQK

SEQ ID NO: 6903 - protein, 6 aa, ARTIFICIAL SEQUENCE
  Synthetic Construct
AKEQRK

SEQ ID NO: 6904 - protein, 6 aa, ARTIFICIAL SEQUENCE
  Synthetic Construct
AKEQSK

SEQ ID NO: 6905 - protein, 6 aa, ARTIFICIAL SEQUENCE
  Synthetic Construct
AKEQTK

SEQ ID NO: 6906 - protein, 6 aa, ARTIFICIAL SEQUENCE
  Synthetic Construct
AKEQYK

SEQ ID NO: 6907 - protein, 6 aa, ARTIFICIAL SEQUENCE
  Synthetic Construct
AKERAK

SEQ ID NO: 6908 - protein, 6 aa, ARTIFICIAL SEQUENCE
  Synthetic Construct
AKERDK

SEQ ID NO: 6909 - protein, 6 aa, ARTIFICIAL SEQUENCE
  Synthetic Construct
AKEREK

SEQ ID NO: 6910 - protein, 6 aa, ARTIFICIAL SEQUENCE
  Synthetic Construct
AKERFK

SEQ ID NO: 6911 - protein, 6 aa, ARTIFICIAL SEQUENCE
  Synthetic Construct
AKERGK

SEQ ID NO: 6912 - protein, 6 aa, ARTIFICIAL SEQUENCE
  Synthetic Construct
AKERHK

SEQ ID NO: 6913 - protein, 6 aa, ARTIFICIAL SEQUENCE
  Synthetic Construct
AKERIK

SEQ ID NO: 6914 - protein, 6 aa, ARTIFICIAL SEQUENCE
  Synthetic Construct
AKERLK

SEQ ID NO: 6915 - protein, 6 aa, ARTIFICIAL SEQUENCE
  Synthetic Construct
AKERNK

SEQ ID NO: 6916 - protein, 6 aa, ARTIFICIAL SEQUENCE
  Synthetic Construct
AKERQK

SEQ ID NO: 6917 - protein, 6 aa, ARTIFICIAL SEQUENCE
  Synthetic Construct
AKERRK

SEQ ID NO: 6918 - protein, 6 aa, ARTIFICIAL SEQUENCE
  Synthetic Construct
AKERSK

SEQ ID NO: 6919 - protein, 6 aa, ARTIFICIAL SEQUENCE
  Synthetic Construct
AKERTK

SEQ ID NO: 6920 - protein, 6 aa, ARTIFICIAL SEQUENCE
  Synthetic Construct
AKERYK

SEQ ID NO: 6921 - protein, 6 aa, ARTIFICIAL SEQUENCE
  Synthetic Construct
AKESAK

SEQ ID NO: 6922 - protein, 6 aa, ARTIFICIAL SEQUENCE
  Synthetic Construct
AKESDK

SEQ ID NO: 6923 - protein, 6 aa, ARTIFICIAL SEQUENCE
  Synthetic Construct
AKESEK

SEQ ID NO: 6924 - protein, 6 aa, ARTIFICIAL SEQUENCE
  Synthetic Construct
AKESFK

SEQ ID NO: 6925 - protein, 6 aa, ARTIFICIAL SEQUENCE
  Synthetic Construct
AKESGK

SEQ ID NO: 6926 - protein, 6 aa, ARTIFICIAL SEQUENCE
  Synthetic Construct
AKESHK

SEQ ID NO: 6927 - protein, 6 aa, ARTIFICIAL SEQUENCE
  Synthetic Construct
AKESIK

SEQ ID NO: 6928 - protein, 6 aa, ARTIFICIAL SEQUENCE
  Synthetic Construct
AKESLK

SEQ ID NO: 6929 - protein, 6 aa, ARTIFICIAL SEQUENCE
  Synthetic Construct
AKESNK

SEQ ID NO: 6930 - protein, 6 aa, ARTIFICIAL SEQUENCE
  Synthetic Construct
AKESQK

SEQ ID NO: 6931 - protein, 6 aa, ARTIFICIAL SEQUENCE
  Synthetic Construct
AKESRK

SEQ ID NO: 6932 - protein, 6 aa, ARTIFICIAL SEQUENCE
  Synthetic Construct
AKESSK

SEQ ID NO: 6933 - protein, 6 aa, ARTIFICIAL SEQUENCE
  Synthetic Construct
AKESTK

SEQ ID NO: 6934 - protein, 6 aa, ARTIFICIAL SEQUENCE
  Synthetic Construct
AKESYK

SEQ ID NO: 6935 - protein, 6 aa, ARTIFICIAL SEQUENCE
  Synthetic Construct
AKETAK

SEQ ID NO: 6936 - protein, 6 aa, ARTIFICIAL SEQUENCE
  Synthetic Construct
AKETDK

SEQ ID NO: 6937 - protein, 6 aa, ARTIFICIAL SEQUENCE
  Synthetic Construct
AKETEK

SEQ ID NO: 6938 - protein, 6 aa, ARTIFICIAL SEQUENCE
  Synthetic Construct
AKETFK

SEQ ID NO: 6939 - protein, 6 aa, ARTIFICIAL SEQUENCE
  Synthetic Construct
AKETGK

SEQ ID NO: 6940 - protein, 6 aa, ARTIFICIAL SEQUENCE
  Synthetic Construct
AKETHK

SEQ ID NO: 6941 - protein, 6 aa, ARTIFICIAL SEQUENCE
  Synthetic Construct
AKETIK

SEQ ID NO: 6942 - protein, 6 aa, ARTIFICIAL SEQUENCE
  Synthetic Construct
AKETLK

SEQ ID NO: 6943 - protein, 6 aa, ARTIFICIAL SEQUENCE
  Synthetic Construct
AKETNK

SEQ ID NO: 6944 - protein, 6 aa, ARTIFICIAL SEQUENCE
  Synthetic Construct
AKETQK

SEQ ID NO: 6945 - protein, 6 aa, ARTIFICIAL SEQUENCE
  Synthetic Construct
AKETRK

SEQ ID NO: 6946 - protein, 6 aa, ARTIFICIAL SEQUENCE
  Synthetic Construct
AKETSK

SEQ ID NO: 6947 - protein, 6 aa, ARTIFICIAL SEQUENCE
  Synthetic Construct
AKETTK

SEQ ID NO: 6948 - protein, 6 aa, ARTIFICIAL SEQUENCE
  Synthetic Construct
AKETYK

SEQ ID NO: 6949 - protein, 6 aa, ARTIFICIAL SEQUENCE
  Synthetic Construct
AKEYAK

SEQ ID NO: 6950 - protein, 6 aa, ARTIFICIAL SEQUENCE
  Synthetic Construct
AKEYDK

SEQ ID NO: 6951 - protein, 6 aa, ARTIFICIAL SEQUENCE
  Synthetic Construct
AKEYEK

SEQ ID NO: 6952 - protein, 6 aa, ARTIFICIAL SEQUENCE
  Synthetic Construct
AKEYFK

SEQ ID NO: 6953 - protein, 6 aa, ARTIFICIAL SEQUENCE
  Synthetic Construct
AKEYGK

SEQ ID NO: 6954 - protein, 6 aa, ARTIFICIAL SEQUENCE
  Synthetic Construct
AKEYHK

SEQ ID NO: 6955 - protein, 6 aa, ARTIFICIAL SEQUENCE
  Synthetic Construct
AKEYIK

SEQ ID NO: 6956 - protein, 6 aa, ARTIFICIAL SEQUENCE
  Synthetic Construct
AKEYLK

SEQ ID NO: 6957 - protein, 6 aa, ARTIFICIAL SEQUENCE
  Synthetic Construct
AKEYNK

SEQ ID NO: 6958 - protein, 6 aa, ARTIFICIAL SEQUENCE
  Synthetic Construct
AKEYQK

SEQ ID NO: 6959 - protein, 6 aa, ARTIFICIAL SEQUENCE
  Synthetic Construct
AKEYRK

SEQ ID NO: 6960 - protein, 6 aa, ARTIFICIAL SEQUENCE
  Synthetic Construct
AKEYSK

SEQ ID NO: 6961 - protein, 6 aa, ARTIFICIAL SEQUENCE
  Synthetic Construct
AKEYTK

SEQ ID NO: 6962 - protein, 6 aa, ARTIFICIAL SEQUENCE
  Synthetic Construct
AKEYYK

SEQ ID NO: 6963 - protein, 6 aa, ARTIFICIAL SEQUENCE
  Synthetic Construct
AKFAAK

SEQ ID NO: 6964 - protein, 6 aa, ARTIFICIAL SEQUENCE
  Synthetic Construct
AKFADK

SEQ ID NO: 6965 - protein, 6 aa, ARTIFICIAL SEQUENCE
  Synthetic Construct
AKFAEK

SEQ ID NO: 6966 - protein, 6 aa, ARTIFICIAL SEQUENCE
  Synthetic Construct
AKFAFK

SEQ ID NO: 6967 - protein, 6 aa, ARTIFICIAL SEQUENCE
  Synthetic Construct
AKFAGK

SEQ ID NO: 6968 - protein, 6 aa, ARTIFICIAL SEQUENCE
  Synthetic Construct
AKFAHK

SEQ ID NO: 6969 - protein, 6 aa, ARTIFICIAL SEQUENCE
  Synthetic Construct
AKFAIK

SEQ ID NO: 6970 - protein, 6 aa, ARTIFICIAL SEQUENCE
  Synthetic Construct
AKFALK

SEQ ID NO: 6971 - protein, 6 aa, ARTIFICIAL SEQUENCE
  Synthetic Construct
AKFANK

SEQ ID NO: 6972 - protein, 6 aa, ARTIFICIAL SEQUENCE
  Synthetic Construct
AKFAQK

SEQ ID NO: 6973 - protein, 6 aa, ARTIFICIAL SEQUENCE
  Synthetic Construct
AKFARK

SEQ ID NO: 6974 - protein, 6 aa, ARTIFICIAL SEQUENCE
  Synthetic Construct
AKFASK

SEQ ID NO: 6975 - protein, 6 aa, ARTIFICIAL SEQUENCE
  Synthetic Construct
AKFATK

SEQ ID NO: 6976 - protein, 6 aa, ARTIFICIAL SEQUENCE
  Synthetic Construct
AKFAYK

SEQ ID NO: 6977 - protein, 6 aa, ARTIFICIAL SEQUENCE
  Synthetic Construct
AKFDAK

SEQ ID NO: 6978 - protein, 6 aa, ARTIFICIAL SEQUENCE
  Synthetic Construct
AKFDDK

SEQ ID NO: 6979 - protein, 6 aa, ARTIFICIAL SEQUENCE
  Synthetic Construct
AKFDEK

SEQ ID NO: 6980 - protein, 6 aa, ARTIFICIAL SEQUENCE
  Synthetic Construct
AKFDFK

SEQ ID NO: 6981 - protein, 6 aa, ARTIFICIAL SEQUENCE
  Synthetic Construct
AKFDGK

SEQ ID NO: 6982 - protein, 6 aa, ARTIFICIAL SEQUENCE
  Synthetic Construct
AKFDHK

SEQ ID NO: 6983 - protein, 6 aa, ARTIFICIAL SEQUENCE
  Synthetic Construct
AKFDIK

SEQ ID NO: 6984 - protein, 6 aa, ARTIFICIAL SEQUENCE
  Synthetic Construct
AKFDLK

SEQ ID NO: 6985 - protein, 6 aa, ARTIFICIAL SEQUENCE
  Synthetic Construct
AKFDNK

SEQ ID NO: 6986 - protein, 6 aa, ARTIFICIAL SEQUENCE
  Synthetic Construct
AKFDQK

SEQ ID NO: 6987 - protein, 6 aa, ARTIFICIAL SEQUENCE
  Synthetic Construct
AKFDRK

SEQ ID NO: 6988 - protein, 6 aa, ARTIFICIAL SEQUENCE
  Synthetic Construct
AKFDSK

SEQ ID NO: 6989 - protein, 6 aa, ARTIFICIAL SEQUENCE
  Synthetic Construct
AKFDTK

SEQ ID NO: 6990 - protein, 6 aa, ARTIFICIAL SEQUENCE
  Synthetic Construct
AKFDYK

SEQ ID NO: 6991 - protein, 6 aa, ARTIFICIAL SEQUENCE
  Synthetic Construct
AKFEAK

SEQ ID NO: 6992 - protein, 6 aa, ARTIFICIAL SEQUENCE
  Synthetic Construct
AKFEDK

SEQ ID NO: 6993 - protein, 6 aa, ARTIFICIAL SEQUENCE
  Synthetic Construct
AKFEEK

SEQ ID NO: 6994 - protein, 6 aa, ARTIFICIAL SEQUENCE
  Synthetic Construct
AKFEFK

SEQ ID NO: 6995 - protein, 6 aa, ARTIFICIAL SEQUENCE
  Synthetic Construct
AKFEGK

SEQ ID NO: 6996 - protein, 6 aa, ARTIFICIAL SEQUENCE
  Synthetic Construct
AKFEHK

SEQ ID NO: 6997 - protein, 6 aa, ARTIFICIAL SEQUENCE
  Synthetic Construct
AKFEIK

SEQ ID NO: 6998 - protein, 6 aa, ARTIFICIAL SEQUENCE
  Synthetic Construct
AKFELK

SEQ ID NO: 6999 - protein, 6 aa, ARTIFICIAL SEQUENCE
  Synthetic Construct
AKFENK

SEQ ID NO: 7000 - protein, 6 aa, ARTIFICIAL SEQUENCE
  Synthetic Construct
AKFEQK

SEQ ID NO: 7001 - protein, 6 aa, ARTIFICIAL SEQUENCE
  Synthetic Construct
AKFERK

SEQ ID NO: 7002 - protein, 6 aa, ARTIFICIAL SEQUENCE
  Synthetic Construct
AKFESK

SEQ ID NO: 7003 - protein, 6 aa, ARTIFICIAL SEQUENCE
  Synthetic Construct
AKFETK

SEQ ID NO: 7004 - protein, 6 aa, ARTIFICIAL SEQUENCE
  Synthetic Construct
AKFEYK

SEQ ID NO: 7005 - protein, 6 aa, ARTIFICIAL SEQUENCE
  Synthetic Construct
AKFFAK

SEQ ID NO: 7006 - protein, 6 aa, ARTIFICIAL SEQUENCE
  Synthetic Construct
AKFFDK

SEQ ID NO: 7007 - protein, 6 aa, ARTIFICIAL SEQUENCE
  Synthetic Construct
AKFFEK

SEQ ID NO: 7008 - protein, 6 aa, ARTIFICIAL SEQUENCE
  Synthetic Construct
AKFFFK

SEQ ID NO: 7009 - protein, 6 aa, ARTIFICIAL SEQUENCE
  Synthetic Construct
AKFFGK

SEQ ID NO: 7010 - protein, 6 aa, ARTIFICIAL SEQUENCE
  Synthetic Construct
AKFFHK

SEQ ID NO: 7011 - protein, 6 aa, ARTIFICIAL SEQUENCE
  Synthetic Construct
AKFFIK

SEQ ID NO: 7012 - protein, 6 aa, ARTIFICIAL SEQUENCE
  Synthetic Construct
AKFFLK

SEQ ID NO: 7013 - protein, 6 aa, ARTIFICIAL SEQUENCE
  Synthetic Construct
AKFFNK

SEQ ID NO: 7014 - protein, 6 aa, ARTIFICIAL SEQUENCE
  Synthetic Construct
AKFFQK

SEQ ID NO: 7015 - protein, 6 aa, ARTIFICIAL SEQUENCE
  Synthetic Construct
AKFFRK

SEQ ID NO: 7016 - protein, 6 aa, ARTIFICIAL SEQUENCE
  Synthetic Construct
AKFFSK

SEQ ID NO: 7017 - protein, 6 aa, ARTIFICIAL SEQUENCE
  Synthetic Construct
AKFFTK

SEQ ID NO: 7018 - protein, 6 aa, ARTIFICIAL SEQUENCE
  Synthetic Construct
AKFFYK

SEQ ID NO: 7019 - protein, 6 aa, ARTIFICIAL SEQUENCE
  Synthetic Construct
AKFGAK

SEQ ID NO: 7020 - protein, 6 aa, ARTIFICIAL SEQUENCE
  Synthetic Construct
AKFGDK

SEQ ID NO: 7021 - protein, 6 aa, ARTIFICIAL SEQUENCE
  Synthetic Construct
AKFGEK

SEQ ID NO: 7022 - protein, 6 aa, ARTIFICIAL SEQUENCE
  Synthetic Construct
AKFGFK

SEQ ID NO: 7023 - protein, 6 aa, ARTIFICIAL SEQUENCE
  Synthetic Construct
AKFGGK

SEQ ID NO: 7024 - protein, 6 aa, ARTIFICIAL SEQUENCE
  Synthetic Construct
AKFGHK

SEQ ID NO: 7025 - protein, 6 aa, ARTIFICIAL SEQUENCE
  Synthetic Construct
AKFGIK

SEQ ID NO: 7026 - protein, 6 aa, ARTIFICIAL SEQUENCE
  Synthetic Construct
AKFGLK

SEQ ID NO: 7027 - protein, 6 aa, ARTIFICIAL SEQUENCE
  Synthetic Construct
AKFGNK

SEQ ID NO: 7028 - protein, 6 aa, ARTIFICIAL SEQUENCE
  Synthetic Construct
AKFGQK

SEQ ID NO: 7029 - protein, 6 aa, ARTIFICIAL SEQUENCE
  Synthetic Construct
AKFGRK

SEQ ID NO: 7030 - protein, 6 aa, ARTIFICIAL SEQUENCE
  Synthetic Construct
AKFGSK

SEQ ID NO: 7031 - protein, 6 aa, ARTIFICIAL SEQUENCE
  Synthetic Construct
AKFGTK

SEQ ID NO: 7032 - protein, 6 aa, ARTIFICIAL SEQUENCE
  Synthetic Construct
AKFGYK

SEQ ID NO: 7033 - protein, 6 aa, ARTIFICIAL SEQUENCE
  Synthetic Construct
AKFHAK

SEQ ID NO: 7034 - protein, 6 aa, ARTIFICIAL SEQUENCE
  Synthetic Construct
AKFHDK

SEQ ID NO: 7035 - protein, 6 aa, ARTIFICIAL SEQUENCE
  Synthetic Construct
AKFHEK

SEQ ID NO: 7036 - protein, 6 aa, ARTIFICIAL SEQUENCE
  Synthetic Construct
AKFHFK

SEQ ID NO: 7037 - protein, 6 aa, ARTIFICIAL SEQUENCE
  Synthetic Construct
AKFHGK

SEQ ID NO: 7038 - protein, 6 aa, ARTIFICIAL SEQUENCE
  Synthetic Construct
AKFHHK

SEQ ID NO: 7039 - protein, 6 aa, ARTIFICIAL SEQUENCE
  Synthetic Construct
AKFHIK

SEQ ID NO: 7040 - protein, 6 aa, ARTIFICIAL SEQUENCE
  Synthetic Construct
AKFHLK

SEQ ID NO: 7041 - protein, 6 aa, ARTIFICIAL SEQUENCE
  Synthetic Construct
AKFHNK

SEQ ID NO: 7042 - protein, 6 aa, ARTIFICIAL SEQUENCE
  Synthetic Construct
AKFHQK

SEQ ID NO: 7043 - protein, 6 aa, ARTIFICIAL SEQUENCE
  Synthetic Construct
AKFHRK

SEQ ID NO: 7044 - protein, 6 aa, ARTIFICIAL SEQUENCE
  Synthetic Construct
AKFHSK

SEQ ID NO: 7045 - protein, 6 aa, ARTIFICIAL SEQUENCE
  Synthetic Construct
AKFHTK

SEQ ID NO: 7046 - protein, 6 aa, ARTIFICIAL SEQUENCE
  Synthetic Construct
AKFHYK

SEQ ID NO: 7047 - protein, 6 aa, ARTIFICIAL SEQUENCE
  Synthetic Construct
AKFIAK

SEQ ID NO: 7048 - protein, 6 aa, ARTIFICIAL SEQUENCE
  Synthetic Construct
AKFIDK

SEQ ID NO: 7049 - protein, 6 aa, ARTIFICIAL SEQUENCE
  Synthetic Construct
AKFIEK

SEQ ID NO: 7050 - protein, 6 aa, ARTIFICIAL SEQUENCE
  Synthetic Construct
AKFIFK

SEQ ID NO: 7051 - protein, 6 aa, ARTIFICIAL SEQUENCE
  Synthetic Construct
AKFIGK

SEQ ID NO: 7052 - protein, 6 aa, ARTIFICIAL SEQUENCE
  Synthetic Construct
AKFIHK

SEQ ID NO: 7053 - protein, 6 aa, ARTIFICIAL SEQUENCE
  Synthetic Construct
AKFIIK

SEQ ID NO: 7054 - protein, 6 aa, ARTIFICIAL SEQUENCE
  Synthetic Construct
AKFILK

SEQ ID NO: 7055 - protein, 6 aa, ARTIFICIAL SEQUENCE
  Synthetic Construct
AKFINK

SEQ ID NO: 7056 - protein, 6 aa, ARTIFICIAL SEQUENCE
  Synthetic Construct
AKFIQK

SEQ ID NO: 7057 - protein, 6 aa, ARTIFICIAL SEQUENCE
  Synthetic Construct
AKFIRK

SEQ ID NO: 7058 - protein, 6 aa, ARTIFICIAL SEQUENCE
  Synthetic Construct
AKFISK

SEQ ID NO: 7059 - protein, 6 aa, ARTIFICIAL SEQUENCE
  Synthetic Construct
AKFITK

SEQ ID NO: 7060 - protein, 6 aa, ARTIFICIAL SEQUENCE
  Synthetic Construct
AKFIYK

SEQ ID NO: 7061 - protein, 6 aa, ARTIFICIAL SEQUENCE
  Synthetic Construct
AKFLAK

SEQ ID NO: 7062 - protein, 6 aa, ARTIFICIAL SEQUENCE
  Synthetic Construct
AKFLDK

SEQ ID NO: 7063 - protein, 6 aa, ARTIFICIAL SEQUENCE
  Synthetic Construct
AKFLEK

SEQ ID NO: 7064 - protein, 6 aa, ARTIFICIAL SEQUENCE
  Synthetic Construct
AKFLFK

SEQ ID NO: 7065 - protein, 6 aa, ARTIFICIAL SEQUENCE
  Synthetic Construct
AKFLGK

SEQ ID NO: 7066 - protein, 6 aa, ARTIFICIAL SEQUENCE
  Synthetic Construct
AKFLHK

SEQ ID NO: 7067 - protein, 6 aa, ARTIFICIAL SEQUENCE
  Synthetic Construct
AKFLIK

SEQ ID NO: 7068 - protein, 6 aa, ARTIFICIAL SEQUENCE
  Synthetic Construct
AKFLLK

SEQ ID NO: 7069 - protein, 6 aa, ARTIFICIAL SEQUENCE
  Synthetic Construct
AKFLNK

SEQ ID NO: 7070 - protein, 6 aa, ARTIFICIAL SEQUENCE
  Synthetic Construct
AKFLQK

SEQ ID NO: 7071 - protein, 6 aa, ARTIFICIAL SEQUENCE
  Synthetic Construct
AKFLRK

SEQ ID NO: 7072 - protein, 6 aa, ARTIFICIAL SEQUENCE
  Synthetic Construct
AKFLSK

SEQ ID NO: 7073 - protein, 6 aa, ARTIFICIAL SEQUENCE
  Synthetic Construct
AKFLTK

SEQ ID NO: 7074 - protein, 6 aa, ARTIFICIAL SEQUENCE
  Synthetic Construct
AKFLYK

SEQ ID NO: 7075 - protein, 6 aa, ARTIFICIAL SEQUENCE
  Synthetic Construct
AKFNAK

SEQ ID NO: 7076 - protein, 6 aa, ARTIFICIAL SEQUENCE
  Synthetic Construct
AKFNDK

SEQ ID NO: 7077 - protein, 6 aa, ARTIFICIAL SEQUENCE
  Synthetic Construct
AKFNEK

SEQ ID NO: 7078 - protein, 6 aa, ARTIFICIAL SEQUENCE
  Synthetic Construct
AKFNFK

SEQ ID NO: 7079 - protein, 6 aa, ARTIFICIAL SEQUENCE
  Synthetic Construct
AKFNGK

SEQ ID NO: 7080 - protein, 6 aa, ARTIFICIAL SEQUENCE
  Synthetic Construct
AKFNHK

SEQ ID NO: 7081 - protein, 6 aa, ARTIFICIAL SEQUENCE
  Synthetic Construct
AKFNIK

SEQ ID NO: 7082 - protein, 6 aa, ARTIFICIAL SEQUENCE
  Synthetic Construct
AKFNLK

SEQ ID NO: 7083 - protein, 6 aa, ARTIFICIAL SEQUENCE
  Synthetic Construct
AKFNNK

SEQ ID NO: 7084 - protein, 6 aa, ARTIFICIAL SEQUENCE
  Synthetic Construct
AKFNQK

SEQ ID NO: 7085 - protein, 6 aa, ARTIFICIAL SEQUENCE
  Synthetic Construct
AKFNRK

SEQ ID NO: 7086 - protein, 6 aa, ARTIFICIAL SEQUENCE
  Synthetic Construct
AKFNSK

SEQ ID NO: 7087 - protein, 6 aa, ARTIFICIAL SEQUENCE
  Synthetic Construct
AKFNTK

SEQ ID NO: 7088 - protein, 6 aa, ARTIFICIAL SEQUENCE
  Synthetic Construct
AKFNYK

SEQ ID NO: 7089 - protein, 6 aa, ARTIFICIAL SEQUENCE
  Synthetic Construct
AKFQAK

SEQ ID NO: 7090 - protein, 6 aa, ARTIFICIAL SEQUENCE
  Synthetic Construct
AKFQDK

SEQ ID NO: 7091 - protein, 6 aa, ARTIFICIAL SEQUENCE
  Synthetic Construct
AKFQEK

SEQ ID NO: 7092 - protein, 6 aa, ARTIFICIAL SEQUENCE
  Synthetic Construct
AKFQFK

SEQ ID NO: 7093 - protein, 6 aa, ARTIFICIAL SEQUENCE
  Synthetic Construct
AKFQGK

SEQ ID NO: 7094 - protein, 6 aa, ARTIFICIAL SEQUENCE
  Synthetic Construct
AKFQHK

SEQ ID NO: 7095 - protein, 6 aa, ARTIFICIAL SEQUENCE
  Synthetic Construct
AKFQIK

SEQ ID NO: 7096 - protein, 6 aa, ARTIFICIAL SEQUENCE
  Synthetic Construct
AKFQLK

SEQ ID NO: 7097 - protein, 6 aa, ARTIFICIAL SEQUENCE
  Synthetic Construct
AKFQNK

SEQ ID NO: 7098 - protein, 6 aa, ARTIFICIAL SEQUENCE
  Synthetic Construct
AKFQQK

SEQ ID NO: 7099 - protein, 6 aa, ARTIFICIAL SEQUENCE
  Synthetic Construct
AKFQRK

SEQ ID NO: 7100 - protein, 6 aa, ARTIFICIAL SEQUENCE
  Synthetic Construct
AKFQSK

SEQ ID NO: 7101 - protein, 6 aa, ARTIFICIAL SEQUENCE
  Synthetic Construct
AKFQTK

SEQ ID NO: 7102 - protein, 6 aa, ARTIFICIAL SEQUENCE
  Synthetic Construct
AKFQYK

SEQ ID NO: 7103 - protein, 6 aa, ARTIFICIAL SEQUENCE
  Synthetic Construct
AKFRAK

SEQ ID NO: 7104 - protein, 6 aa, ARTIFICIAL SEQUENCE
  Synthetic Construct
AKFRDK

SEQ ID NO: 7105 - protein, 6 aa, ARTIFICIAL SEQUENCE
  Synthetic Construct
AKFREK

SEQ ID NO: 7106 - protein, 6 aa, ARTIFICIAL SEQUENCE
  Synthetic Construct
AKFRFK

SEQ ID NO: 7107 - protein, 6 aa, ARTIFICIAL SEQUENCE
  Synthetic Construct
AKFRGK

SEQ ID NO: 7108 - protein, 6 aa, ARTIFICIAL SEQUENCE
  Synthetic Construct
AKFRHK

SEQ ID NO: 7109 - protein, 6 aa, ARTIFICIAL SEQUENCE
  Synthetic Construct
AKFRIK

SEQ ID NO: 7110 - protein, 6 aa, ARTIFICIAL SEQUENCE
  Synthetic Construct
AKFRLK

SEQ ID NO: 7111 - protein, 6 aa, ARTIFICIAL SEQUENCE
  Synthetic Construct
AKFRNK

SEQ ID NO: 7112 - protein, 6 aa, ARTIFICIAL SEQUENCE
  Synthetic Construct
AKFRQK

SEQ ID NO: 7113 - protein, 6 aa, ARTIFICIAL SEQUENCE
  Synthetic Construct
AKFRRK

SEQ ID NO: 7114 - protein, 6 aa, ARTIFICIAL SEQUENCE
  Synthetic Construct
AKFRSK

SEQ ID NO: 7115 - protein, 6 aa, ARTIFICIAL SEQUENCE
  Synthetic Construct
AKFRTK

SEQ ID NO: 7116 - protein, 6 aa, ARTIFICIAL SEQUENCE
  Synthetic Construct
AKFRYK

SEQ ID NO: 7117 - protein, 6 aa, ARTIFICIAL SEQUENCE
  Synthetic Construct
AKFSAK

SEQ ID NO: 7118 - protein, 6 aa, ARTIFICIAL SEQUENCE
  Synthetic Construct
AKFSDK

SEQ ID NO: 7119 - protein, 6 aa, ARTIFICIAL SEQUENCE
  Synthetic Construct
AKFSEK

SEQ ID NO: 7120 - protein, 6 aa, ARTIFICIAL SEQUENCE
  Synthetic Construct
AKFSFK

SEQ ID NO: 7121 - protein, 6 aa, ARTIFICIAL SEQUENCE
  Synthetic Construct
AKFSGK

SEQ ID NO: 7122 - protein, 6 aa, ARTIFICIAL SEQUENCE
  Synthetic Construct
AKFSHK

SEQ ID NO: 7123 - protein, 6 aa, ARTIFICIAL SEQUENCE
  Synthetic Construct
AKFSIK

SEQ ID NO: 7124 - protein, 6 aa, ARTIFICIAL SEQUENCE
  Synthetic Construct
AKFSLK

SEQ ID NO: 7125 - protein, 6 aa, ARTIFICIAL SEQUENCE
  Synthetic Construct
AKFSNK

SEQ ID NO: 7126 - protein, 6 aa, ARTIFICIAL SEQUENCE
  Synthetic Construct
AKFSQK

SEQ ID NO: 7127 - protein, 6 aa, ARTIFICIAL SEQUENCE
  Synthetic Construct
AKFSRK

SEQ ID NO: 7128 - protein, 6 aa, ARTIFICIAL SEQUENCE
  Synthetic Construct
AKFSSK

SEQ ID NO: 7129 - protein, 6 aa, ARTIFICIAL SEQUENCE
  Synthetic Construct
AKFSTK

SEQ ID NO: 7130 - protein, 6 aa, ARTIFICIAL SEQUENCE
  Synthetic Construct
AKFSYK

SEQ ID NO: 7131 - protein, 6 aa, ARTIFICIAL SEQUENCE
  Synthetic Construct
AKFTAK

SEQ ID NO: 7132 - protein, 6 aa, ARTIFICIAL SEQUENCE
  Synthetic Construct
AKFTDK

SEQ ID NO: 7133 - protein, 6 aa, ARTIFICIAL SEQUENCE
  Synthetic Construct
AKFTEK

SEQ ID NO: 7134 - protein, 6 aa, ARTIFICIAL SEQUENCE
  Synthetic Construct
AKFTFK

SEQ ID NO: 7135 - protein, 6 aa, ARTIFICIAL SEQUENCE
  Synthetic Construct
AKFTGK

SEQ ID NO: 7136 - protein, 6 aa, ARTIFICIAL SEQUENCE
  Synthetic Construct
AKFTHK

SEQ ID NO: 7137 - protein, 6 aa, ARTIFICIAL SEQUENCE
  Synthetic Construct
AKFTIK

SEQ ID NO: 7138 - protein, 6 aa, ARTIFICIAL SEQUENCE
  Synthetic Construct
AKFTLK

SEQ ID NO: 7139 - protein, 6 aa, ARTIFICIAL SEQUENCE
  Synthetic Construct
AKFTNK

SEQ ID NO: 7140 - protein, 6 aa, ARTIFICIAL SEQUENCE
  Synthetic Construct
AKFTQK

SEQ ID NO: 7141 - protein, 6 aa, ARTIFICIAL SEQUENCE
  Synthetic Construct
AKFTRK

SEQ ID NO: 7142 - protein, 6 aa, ARTIFICIAL SEQUENCE
  Synthetic Construct
AKFTSK

SEQ ID NO: 7143 - protein, 6 aa, ARTIFICIAL SEQUENCE
  Synthetic Construct
AKFTTK

SEQ ID NO: 7144 - protein, 6 aa, ARTIFICIAL SEQUENCE
  Synthetic Construct
AKFTYK

SEQ ID NO: 7145 - protein, 6 aa, ARTIFICIAL SEQUENCE
  Synthetic Construct
AKFYAK

SEQ ID NO: 7146 - protein, 6 aa, ARTIFICIAL SEQUENCE
  Synthetic Construct
AKFYDK

SEQ ID NO: 7147 - protein, 6 aa, ARTIFICIAL SEQUENCE
  Synthetic Construct
AKFYEK

SEQ ID NO: 7148 - protein, 6 aa, ARTIFICIAL SEQUENCE
  Synthetic Construct
AKFYFK

SEQ ID NO: 7149 - protein, 6 aa, ARTIFICIAL SEQUENCE
  Synthetic Construct
AKFYGK

SEQ ID NO: 7150 - protein, 6 aa, ARTIFICIAL SEQUENCE
  Synthetic Construct
AKFYHK

SEQ ID NO: 7151 - protein, 6 aa, ARTIFICIAL SEQUENCE
  Synthetic Construct
AKFYIK

SEQ ID NO: 7152 - protein, 6 aa, ARTIFICIAL SEQUENCE
  Synthetic Construct
AKFYLK

SEQ ID NO: 7153 - protein, 6 aa, ARTIFICIAL SEQUENCE
  Synthetic Construct
AKFYNK

SEQ ID NO: 7154 - protein, 6 aa, ARTIFICIAL SEQUENCE
  Synthetic Construct
AKFYQK

SEQ ID NO: 7155 - protein, 6 aa, ARTIFICIAL SEQUENCE
  Synthetic Construct
AKFYRK

SEQ ID NO: 7156 - protein, 6 aa, ARTIFICIAL SEQUENCE
  Synthetic Construct
AKFYSK

SEQ ID NO: 7157 - protein, 6 aa, ARTIFICIAL SEQUENCE
  Synthetic Construct
AKFYTK

SEQ ID NO: 7158 - protein, 6 aa, ARTIFICIAL SEQUENCE
  Synthetic Construct
AKFYYK

SEQ ID NO: 7159 - protein, 6 aa, ARTIFICIAL SEQUENCE
  Synthetic Construct
AKGAAK

SEQ ID NO: 7160 - protein, 6 aa, ARTIFICIAL SEQUENCE
  Synthetic Construct
AKGADK

SEQ ID NO: 7161 - protein, 6 aa, ARTIFICIAL SEQUENCE
  Synthetic Construct
AKGAEK

SEQ ID NO: 7162 - protein, 6 aa, ARTIFICIAL SEQUENCE
  Synthetic Construct
AKGAFK

SEQ ID NO: 7163 - protein, 6 aa, ARTIFICIAL SEQUENCE
  Synthetic Construct
AKGAGK

SEQ ID NO: 7164 - protein, 6 aa, ARTIFICIAL SEQUENCE
  Synthetic Construct
AKGAHK

SEQ ID NO: 7165 - protein, 6 aa, ARTIFICIAL SEQUENCE
  Synthetic Construct
AKGAIK

SEQ ID NO: 7166 - protein, 6 aa, ARTIFICIAL SEQUENCE
  Synthetic Construct
AKGALK

SEQ ID NO: 7167 - protein, 6 aa, ARTIFICIAL SEQUENCE
  Synthetic Construct
AKGANK

SEQ ID NO: 7168 - protein, 6 aa, ARTIFICIAL SEQUENCE
  Synthetic Construct
AKGAQK

SEQ ID NO: 7169 - protein, 6 aa, ARTIFICIAL SEQUENCE
  Synthetic Construct
AKGARK

SEQ ID NO: 7170 - protein, 6 aa, ARTIFICIAL SEQUENCE
  Synthetic Construct
AKGASK

SEQ ID NO: 7171 - protein, 6 aa, ARTIFICIAL SEQUENCE
  Synthetic Construct
AKGATK

SEQ ID NO: 7172 - protein, 6 aa, ARTIFICIAL SEQUENCE
  Synthetic Construct
AKGAYK

SEQ ID NO: 7173 - protein, 6 aa, ARTIFICIAL SEQUENCE
  Synthetic Construct
AKGDAK

SEQ ID NO: 7174 - protein, 6 aa, ARTIFICIAL SEQUENCE
  Synthetic Construct
AKGDDK

SEQ ID NO: 7175 - protein, 6 aa, ARTIFICIAL SEQUENCE
  Synthetic Construct
AKGDEK

SEQ ID NO: 7176 - protein, 6 aa, ARTIFICIAL SEQUENCE
  Synthetic Construct
AKGDFK

SEQ ID NO: 7177 - protein, 6 aa, ARTIFICIAL SEQUENCE
  Synthetic Construct
AKGDGK

SEQ ID NO: 7178 - protein, 6 aa, ARTIFICIAL SEQUENCE
  Synthetic Construct
AKGDHK

SEQ ID NO: 7179 - protein, 6 aa, ARTIFICIAL SEQUENCE
  Synthetic Construct
AKGDIK

SEQ ID NO: 7180 - protein, 6 aa, ARTIFICIAL SEQUENCE
  Synthetic Construct
AKGDLK

SEQ ID NO: 7181 - protein, 6 aa, ARTIFICIAL SEQUENCE
  Synthetic Construct
AKGDNK

SEQ ID NO: 7182 - protein, 6 aa, ARTIFICIAL SEQUENCE
  Synthetic Construct
AKGDQK

SEQ ID NO: 7183 - protein, 6 aa, ARTIFICIAL SEQUENCE
  Synthetic Construct
AKGDRK

SEQ ID NO: 7184 - protein, 6 aa, ARTIFICIAL SEQUENCE
  Synthetic Construct
AKGDSK

SEQ ID NO: 7185 - protein, 6 aa, ARTIFICIAL SEQUENCE
  Synthetic Construct
AKGDTK

SEQ ID NO: 7186 - protein, 6 aa, ARTIFICIAL SEQUENCE
  Synthetic Construct
AKGDYK

SEQ ID NO: 7187 - protein, 6 aa, ARTIFICIAL SEQUENCE
  Synthetic Construct
AKGEAK

SEQ ID NO: 7188 - protein, 6 aa, ARTIFICIAL SEQUENCE
  Synthetic Construct
AKGEDK

SEQ ID NO: 7189 - protein, 6 aa, ARTIFICIAL SEQUENCE
  Synthetic Construct
AKGEEK

SEQ ID NO: 7190 - protein, 6 aa, ARTIFICIAL SEQUENCE
  Synthetic Construct
AKGEFK

SEQ ID NO: 7191 - protein, 6 aa, ARTIFICIAL SEQUENCE
  Synthetic Construct
AKGEGK

SEQ ID NO: 7192 - protein, 6 aa, ARTIFICIAL SEQUENCE
  Synthetic Construct
AKGEHK

SEQ ID NO: 7193 - protein, 6 aa, ARTIFICIAL SEQUENCE
  Synthetic Construct
AKGEIK

SEQ ID NO: 7194 - protein, 6 aa, ARTIFICIAL SEQUENCE
  Synthetic Construct
AKGELK

SEQ ID NO: 7195 - protein, 6 aa, ARTIFICIAL SEQUENCE
  Synthetic Construct
AKGENK

SEQ ID NO: 7196 - protein, 6 aa, ARTIFICIAL SEQUENCE
  Synthetic Construct
AKGEQK

SEQ ID NO: 7197 - protein, 6 aa, ARTIFICIAL SEQUENCE
  Synthetic Construct
AKGERK

SEQ ID NO: 7198 - protein, 6 aa, ARTIFICIAL SEQUENCE
  Synthetic Construct
AKGESK

SEQ ID NO: 7199 - protein, 6 aa, ARTIFICIAL SEQUENCE
  Synthetic Construct
AKGETK

SEQ ID NO: 7200 - protein, 6 aa, ARTIFICIAL SEQUENCE
  Synthetic Construct
AKGEYK

SEQ ID NO: 7201 - protein, 6 aa, ARTIFICIAL SEQUENCE
  Synthetic Construct
AKGFAK

SEQ ID NO: 7202 - protein, 6 aa, ARTIFICIAL SEQUENCE
  Synthetic Construct
AKGFDK

SEQ ID NO: 7203 - protein, 6 aa, ARTIFICIAL SEQUENCE
  Synthetic Construct
AKGFEK

SEQ ID NO: 7204 - protein, 6 aa, ARTIFICIAL SEQUENCE
  Synthetic Construct
AKGFFK

SEQ ID NO: 7205 - protein, 6 aa, ARTIFICIAL SEQUENCE
  Synthetic Construct
AKGFGK

SEQ ID NO: 7206 - protein, 6 aa, ARTIFICIAL SEQUENCE
  Synthetic Construct
AKGFHK

SEQ ID NO: 7207 - protein, 6 aa, ARTIFICIAL SEQUENCE
  Synthetic Construct
AKGFIK

SEQ ID NO: 7208 - protein, 6 aa, ARTIFICIAL SEQUENCE
  Synthetic Construct
AKGFLK

SEQ ID NO: 7209 - protein, 6 aa, ARTIFICIAL SEQUENCE
  Synthetic Construct
AKGFNK

SEQ ID NO: 7210 - protein, 6 aa, ARTIFICIAL SEQUENCE
  Synthetic Construct
AKGFQK

SEQ ID NO: 7211 - protein, 6 aa, ARTIFICIAL SEQUENCE
  Synthetic Construct
AKGFRK

SEQ ID NO: 7212 - protein, 6 aa, ARTIFICIAL SEQUENCE
  Synthetic Construct
AKGFSK

SEQ ID NO: 7213 - protein, 6 aa, ARTIFICIAL SEQUENCE
  Synthetic Construct
AKGFTK

SEQ ID NO: 7214 - protein, 6 aa, ARTIFICIAL SEQUENCE
  Synthetic Construct
AKGFYK

SEQ ID NO: 7215 - protein, 6 aa, ARTIFICIAL SEQUENCE
  Synthetic Construct
AKGGAK

SEQ ID NO: 7216 - protein, 6 aa, ARTIFICIAL SEQUENCE
  Synthetic Construct
AKGGDK

SEQ ID NO: 7217 - protein, 6 aa, ARTIFICIAL SEQUENCE
  Synthetic Construct
AKGGEK

SEQ ID NO: 7218 - protein, 6 aa, ARTIFICIAL SEQUENCE
  Synthetic Construct
AKGGFK

SEQ ID NO: 7219 - protein, 6 aa, ARTIFICIAL SEQUENCE
  Synthetic Construct
AKGGGK

SEQ ID NO: 7220 - protein, 6 aa, ARTIFICIAL SEQUENCE
  Synthetic Construct
AKGGHK

SEQ ID NO: 7221 - protein, 6 aa, ARTIFICIAL SEQUENCE
  Synthetic Construct
AKGGIK

SEQ ID NO: 7222 - protein, 6 aa, ARTIFICIAL SEQUENCE
  Synthetic Construct
AKGGLK

SEQ ID NO: 7223 - protein, 6 aa, ARTIFICIAL SEQUENCE
  Synthetic Construct
AKGGNK

SEQ ID NO: 7224 - protein, 6 aa, ARTIFICIAL SEQUENCE
  Synthetic Construct
AKGGQK

SEQ ID NO: 7225 - protein, 6 aa, ARTIFICIAL SEQUENCE
  Synthetic Construct
AKGGRK

SEQ ID NO: 7226 - protein, 6 aa, ARTIFICIAL SEQUENCE
  Synthetic Construct
AKGGSK

SEQ ID NO: 7227 - protein, 6 aa, ARTIFICIAL SEQUENCE
  Synthetic Construct
AKGGTK

SEQ ID NO: 7228 - protein, 6 aa, ARTIFICIAL SEQUENCE
  Synthetic Construct
AKGGYK

SEQ ID NO: 7229 - protein, 6 aa, ARTIFICIAL SEQUENCE
  Synthetic Construct
AKGHAK

SEQ ID NO: 7230 - protein, 6 aa, ARTIFICIAL SEQUENCE
  Synthetic Construct
AKGHDK

SEQ ID NO: 7231 - protein, 6 aa, ARTIFICIAL SEQUENCE
  Synthetic Construct
AKGHEK

SEQ ID NO: 7232 - protein, 6 aa, ARTIFICIAL SEQUENCE
  Synthetic Construct
AKGHFK

SEQ ID NO: 7233 - protein, 6 aa, ARTIFICIAL SEQUENCE
  Synthetic Construct
AKGHGK

SEQ ID NO: 7234 - protein, 6 aa, ARTIFICIAL SEQUENCE
  Synthetic Construct
AKGHHK

SEQ ID NO: 7235 - protein, 6 aa, ARTIFICIAL SEQUENCE
  Synthetic Construct
AKGHIK

SEQ ID NO: 7236 - protein, 6 aa, ARTIFICIAL SEQUENCE
  Synthetic Construct
AKGHLK

SEQ ID NO: 7237 - protein, 6 aa, ARTIFICIAL SEQUENCE
  Synthetic Construct
AKGHNK

SEQ ID NO: 7238 - protein, 6 aa, ARTIFICIAL SEQUENCE
  Synthetic Construct
AKGHQK

SEQ ID NO: 7239 - protein, 6 aa, ARTIFICIAL SEQUENCE
  Synthetic Construct
AKGHRK

SEQ ID NO: 7240 - protein, 6 aa, ARTIFICIAL SEQUENCE
  Synthetic Construct
AKGHSK

SEQ ID NO: 7241 - protein, 6 aa, ARTIFICIAL SEQUENCE
  Synthetic Construct
AKGHTK

SEQ ID NO: 7242 - protein, 6 aa, ARTIFICIAL SEQUENCE
  Synthetic Construct
AKGHYK

SEQ ID NO: 7243 - protein, 6 aa, ARTIFICIAL SEQUENCE
  Synthetic Construct
AKGIAK

SEQ ID NO: 7244 - protein, 6 aa, ARTIFICIAL SEQUENCE
  Synthetic Construct
AKGIDK

SEQ ID NO: 7245 - protein, 6 aa, ARTIFICIAL SEQUENCE
  Synthetic Construct
AKGIEK

SEQ ID NO: 7246 - protein, 6 aa, ARTIFICIAL SEQUENCE
  Synthetic Construct
AKGIFK

SEQ ID NO: 7247 - protein, 6 aa, ARTIFICIAL SEQUENCE
  Synthetic Construct
AKGIGK

SEQ ID NO: 7248 - protein, 6 aa, ARTIFICIAL SEQUENCE
  Synthetic Construct
AKGIHK

SEQ ID NO: 7249 - protein, 6 aa, ARTIFICIAL SEQUENCE
  Synthetic Construct
AKGIIK

SEQ ID NO: 7250 - protein, 6 aa, ARTIFICIAL SEQUENCE
  Synthetic Construct
AKGILK

SEQ ID NO: 7251 - protein, 6 aa, ARTIFICIAL SEQUENCE
  Synthetic Construct
AKGINK

SEQ ID NO: 7252 - protein, 6 aa, ARTIFICIAL SEQUENCE
  Synthetic Construct
AKGIQK

SEQ ID NO: 7253 - protein, 6 aa, ARTIFICIAL SEQUENCE
  Synthetic Construct
AKGIRK

SEQ ID NO: 7254 - protein, 6 aa, ARTIFICIAL SEQUENCE
  Synthetic Construct
AKGISK

SEQ ID NO: 7255 - protein, 6 aa, ARTIFICIAL SEQUENCE
  Synthetic Construct
AKGITK

SEQ ID NO: 7256 - protein, 6 aa, ARTIFICIAL SEQUENCE
  Synthetic Construct
AKGIYK

SEQ ID NO: 7257 - protein, 6 aa, ARTIFICIAL SEQUENCE
  Synthetic Construct
AKGLAK

SEQ ID NO: 7258 - protein, 6 aa, ARTIFICIAL SEQUENCE
  Synthetic Construct
AKGLDK

SEQ ID NO: 7259 - protein, 6 aa, ARTIFICIAL SEQUENCE
  Synthetic Construct
AKGLEK

SEQ ID NO: 7260 - protein, 6 aa, ARTIFICIAL SEQUENCE
  Synthetic Construct
AKGLFK

SEQ ID NO: 7261 - protein, 6 aa, ARTIFICIAL SEQUENCE
  Synthetic Construct
AKGLGK

SEQ ID NO: 7262 - protein, 6 aa, ARTIFICIAL SEQUENCE
  Synthetic Construct
AKGLHK

SEQ ID NO: 7263 - protein, 6 aa, ARTIFICIAL SEQUENCE
  Synthetic Construct
AKGLIK

SEQ ID NO: 7264 - protein, 6 aa, ARTIFICIAL SEQUENCE
  Synthetic Construct
AKGLLK

SEQ ID NO: 7265 - protein, 6 aa, ARTIFICIAL SEQUENCE
  Synthetic Construct
AKGLNK

SEQ ID NO: 7266 - protein, 6 aa, ARTIFICIAL SEQUENCE
  Synthetic Construct
AKGLQK

SEQ ID NO: 7267 - protein, 6 aa, ARTIFICIAL SEQUENCE
  Synthetic Construct
AKGLRK

SEQ ID NO: 7268 - protein, 6 aa, ARTIFICIAL SEQUENCE
  Synthetic Construct
AKGLSK

SEQ ID NO: 7269 - protein, 6 aa, ARTIFICIAL SEQUENCE
  Synthetic Construct
AKGLTK

SEQ ID NO: 7270 - protein, 6 aa, ARTIFICIAL SEQUENCE
  Synthetic Construct
AKGLYK

SEQ ID NO: 7271 - protein, 6 aa, ARTIFICIAL SEQUENCE
  Synthetic Construct
AKGNAK

SEQ ID NO: 7272 - protein, 6 aa, ARTIFICIAL SEQUENCE
  Synthetic Construct
AKGNDK

SEQ ID NO: 7273 - protein, 6 aa, ARTIFICIAL SEQUENCE
  Synthetic Construct
AKGNEK

SEQ ID NO: 7274 - protein, 6 aa, ARTIFICIAL SEQUENCE
  Synthetic Construct
AKGNFK

SEQ ID NO: 7275 - protein, 6 aa, ARTIFICIAL SEQUENCE
  Synthetic Construct
AKGNGK

SEQ ID NO: 7276 - protein, 6 aa, ARTIFICIAL SEQUENCE
  Synthetic Construct
AKGNHK

SEQ ID NO: 7277 - protein, 6 aa, ARTIFICIAL SEQUENCE
  Synthetic Construct
AKGNIK

SEQ ID NO: 7278 - protein, 6 aa, ARTIFICIAL SEQUENCE
  Synthetic Construct
AKGNLK

SEQ ID NO: 7279 - protein, 6 aa, ARTIFICIAL SEQUENCE
  Synthetic Construct
AKGNNK

SEQ ID NO: 7280 - protein, 6 aa, ARTIFICIAL SEQUENCE
  Synthetic Construct
AKGNQK

SEQ ID NO: 7281 - protein, 6 aa, ARTIFICIAL SEQUENCE
  Synthetic Construct
AKGNRK

SEQ ID NO: 7282 - protein, 6 aa, ARTIFICIAL SEQUENCE
  Synthetic Construct
AKGNSK

SEQ ID NO: 7283 - protein, 6 aa, ARTIFICIAL SEQUENCE
  Synthetic Construct
AKGNTK

SEQ ID NO: 7284 - protein, 6 aa, ARTIFICIAL SEQUENCE
  Synthetic Construct
AKGNYK

SEQ ID NO: 7285 - protein, 6 aa, ARTIFICIAL SEQUENCE
  Synthetic Construct
AKGQAK

SEQ ID NO: 7286 - protein, 6 aa, ARTIFICIAL SEQUENCE
  Synthetic Construct
AKGQDK

SEQ ID NO: 7287 - protein, 6 aa, ARTIFICIAL SEQUENCE
  Synthetic Construct
AKGQEK

SEQ ID NO: 7288 - protein, 6 aa, ARTIFICIAL SEQUENCE
  Synthetic Construct
AKGQFK

SEQ ID NO: 7289 - protein, 6 aa, ARTIFICIAL SEQUENCE
  Synthetic Construct
AKGQGK

SEQ ID NO: 7290 - protein, 6 aa, ARTIFICIAL SEQUENCE
  Synthetic Construct
AKGQHK

SEQ ID NO: 7291 - protein, 6 aa, ARTIFICIAL SEQUENCE
  Synthetic Construct
AKGQIK

SEQ ID NO: 7292 - protein, 6 aa, ARTIFICIAL SEQUENCE
  Synthetic Construct
AKGQLK

SEQ ID NO: 7293 - protein, 6 aa, ARTIFICIAL SEQUENCE
  Synthetic Construct
AKGQNK

SEQ ID NO: 7294 - protein, 6 aa, ARTIFICIAL SEQUENCE
  Synthetic Construct
AKGQQK

SEQ ID NO: 7295 - protein, 6 aa, ARTIFICIAL SEQUENCE
  Synthetic Construct
AKGQRK

SEQ ID NO: 7296 - protein, 6 aa, ARTIFICIAL SEQUENCE
  Synthetic Construct
AKGQSK

SEQ ID NO: 7297 - protein, 6 aa, ARTIFICIAL SEQUENCE
  Synthetic Construct
AKGQTK

SEQ ID NO: 7298 - protein, 6 aa, ARTIFICIAL SEQUENCE
  Synthetic Construct
AKGQYK

SEQ ID NO: 7299 - protein, 6 aa, ARTIFICIAL SEQUENCE
  Synthetic Construct
AKGRAK

SEQ ID NO: 7300 - protein, 6 aa, ARTIFICIAL SEQUENCE
  Synthetic Construct
AKGRDK

SEQ ID NO: 7301 - protein, 6 aa, ARTIFICIAL SEQUENCE
  Synthetic Construct
AKGREK

SEQ ID NO: 7302 - protein, 6 aa, ARTIFICIAL SEQUENCE
  Synthetic Construct
AKGRFK

SEQ ID NO: 7303 - protein, 6 aa, ARTIFICIAL SEQUENCE
  Synthetic Construct
AKGRGK

SEQ ID NO: 7304 - protein, 6 aa, ARTIFICIAL SEQUENCE
  Synthetic Construct
AKGRHK

SEQ ID NO: 7305 - protein, 6 aa, ARTIFICIAL SEQUENCE
  Synthetic Construct
AKGRIK

SEQ ID NO: 7306 - protein, 6 aa, ARTIFICIAL SEQUENCE
  Synthetic Construct
AKGRLK

SEQ ID NO: 7307 - protein, 6 aa, ARTIFICIAL SEQUENCE
  Synthetic Construct
AKGRNK

SEQ ID NO: 7308 - protein, 6 aa, ARTIFICIAL SEQUENCE
  Synthetic Construct
AKGRQK

SEQ ID NO: 7309 - protein, 6 aa, ARTIFICIAL SEQUENCE
  Synthetic Construct
AKGRRK

SEQ ID NO: 7310 - protein, 6 aa, ARTIFICIAL SEQUENCE
  Synthetic Construct
AKGRSK

SEQ ID NO: 7311 - protein, 6 aa, ARTIFICIAL SEQUENCE
  Synthetic Construct
AKGRTK

SEQ ID NO: 7312 - protein, 6 aa, ARTIFICIAL SEQUENCE
  Synthetic Construct
AKGRYK

SEQ ID NO: 7313 - protein, 6 aa, ARTIFICIAL SEQUENCE
  Synthetic Construct
AKGSAK

SEQ ID NO: 7314 - protein, 6 aa, ARTIFICIAL SEQUENCE
  Synthetic Construct
AKGSDK

SEQ ID NO: 7315 - protein, 6 aa, ARTIFICIAL SEQUENCE
  Synthetic Construct
AKGSEK

SEQ ID NO: 7316 - protein, 6 aa, ARTIFICIAL SEQUENCE
  Synthetic Construct
AKGSFK

SEQ ID NO: 7317 - protein, 6 aa, ARTIFICIAL SEQUENCE
  Synthetic Construct
AKGSGK

SEQ ID NO: 7318 - protein, 6 aa, ARTIFICIAL SEQUENCE
  Synthetic Construct
AKGSHK

SEQ ID NO: 7319 - protein, 6 aa, ARTIFICIAL SEQUENCE
  Synthetic Construct
AKGSIK

SEQ ID NO: 7320 - protein, 6 aa, ARTIFICIAL SEQUENCE
  Synthetic Construct
AKGSLK

SEQ ID NO: 7321 - protein, 6 aa, ARTIFICIAL SEQUENCE
  Synthetic Construct
AKGSNK

SEQ ID NO: 7322 - protein, 6 aa, ARTIFICIAL SEQUENCE
  Synthetic Construct
AKGSQK

SEQ ID NO: 7323 - protein, 6 aa, ARTIFICIAL SEQUENCE
  Synthetic Construct
AKGSRK

SEQ ID NO: 7324 - protein, 6 aa, ARTIFICIAL SEQUENCE
  Synthetic Construct
AKGSSK

SEQ ID NO: 7325 - protein, 6 aa, ARTIFICIAL SEQUENCE
  Synthetic Construct
AKGSTK

SEQ ID NO: 7326 - protein, 6 aa, ARTIFICIAL SEQUENCE
  Synthetic Construct
AKGSYK

SEQ ID NO: 7327 - protein, 6 aa, ARTIFICIAL SEQUENCE
  Synthetic Construct
AKGTAK

SEQ ID NO: 7328 - protein, 6 aa, ARTIFICIAL SEQUENCE
  Synthetic Construct
AKGTDK

SEQ ID NO: 7329 - protein, 6 aa, ARTIFICIAL SEQUENCE
  Synthetic Construct
AKGTEK

SEQ ID NO: 7330 - protein, 6 aa, ARTIFICIAL SEQUENCE
  Synthetic Construct
AKGTFK

SEQ ID NO: 7331 - protein, 6 aa, ARTIFICIAL SEQUENCE
  Synthetic Construct
AKGTGK

SEQ ID NO: 7332 - protein, 6 aa, ARTIFICIAL SEQUENCE
  Synthetic Construct
AKGTHK

SEQ ID NO: 7333 - protein, 6 aa, ARTIFICIAL SEQUENCE
  Synthetic Construct
AKGTIK

SEQ ID NO: 7334 - protein, 6 aa, ARTIFICIAL SEQUENCE
  Synthetic Construct
AKGTLK

SEQ ID NO: 7335 - protein, 6 aa, ARTIFICIAL SEQUENCE
  Synthetic Construct
AKGTNK

SEQ ID NO: 7336 - protein, 6 aa, ARTIFICIAL SEQUENCE
  Synthetic Construct
AKGTQK

SEQ ID NO: 7337 - protein, 6 aa, ARTIFICIAL SEQUENCE
  Synthetic Construct
AKGTRK

SEQ ID NO: 7338 - protein, 6 aa, ARTIFICIAL SEQUENCE
  Synthetic Construct
AKGTSK

SEQ ID NO: 7339 - protein, 6 aa, ARTIFICIAL SEQUENCE
  Synthetic Construct
AKGTTK

SEQ ID NO: 7340 - protein, 6 aa, ARTIFICIAL SEQUENCE
  Synthetic Construct
AKGTYK

SEQ ID NO: 7341 - protein, 6 aa, ARTIFICIAL SEQUENCE
  Synthetic Construct
AKGYAK

SEQ ID NO: 7342 - protein, 6 aa, ARTIFICIAL SEQUENCE
  Synthetic Construct
AKGYDK

SEQ ID NO: 7343 - protein, 6 aa, ARTIFICIAL SEQUENCE
  Synthetic Construct
AKGYEK

SEQ ID NO: 7344 - protein, 6 aa, ARTIFICIAL SEQUENCE
  Synthetic Construct
AKGYFK

SEQ ID NO: 7345 - protein, 6 aa, ARTIFICIAL SEQUENCE
  Synthetic Construct
AKGYGK

SEQ ID NO: 7346 - protein, 6 aa, ARTIFICIAL SEQUENCE
  Synthetic Construct
AKGYHK

SEQ ID NO: 7347 - protein, 6 aa, ARTIFICIAL SEQUENCE
  Synthetic Construct
AKGYIK

SEQ ID NO: 7348 - protein, 6 aa, ARTIFICIAL SEQUENCE
  Synthetic Construct
AKGYLK

SEQ ID NO: 7349 - protein, 6 aa, ARTIFICIAL SEQUENCE
  Synthetic Construct
AKGYNK

SEQ ID NO: 7350 - protein, 6 aa, ARTIFICIAL SEQUENCE
  Synthetic Construct
AKGYQK

SEQ ID NO: 7351 - protein, 6 aa, ARTIFICIAL SEQUENCE
  Synthetic Construct
AKGYRK

SEQ ID NO: 7352 - protein, 6 aa, ARTIFICIAL SEQUENCE
  Synthetic Construct
AKGYSK

SEQ ID NO: 7353 - protein, 6 aa, ARTIFICIAL SEQUENCE
  Synthetic Construct
AKGYTK

SEQ ID NO: 7354 - protein, 6 aa, ARTIFICIAL SEQUENCE
  Synthetic Construct
AKGYYK

SEQ ID NO: 7355 - protein, 6 aa, ARTIFICIAL SEQUENCE
  Synthetic Construct
AKHAAK

SEQ ID NO: 7356 - protein, 6 aa, ARTIFICIAL SEQUENCE
  Synthetic Construct
AKHADK

SEQ ID NO: 7357 - protein, 6 aa, ARTIFICIAL SEQUENCE
  Synthetic Construct
AKHAEK

SEQ ID NO: 7358 - protein, 6 aa, ARTIFICIAL SEQUENCE
  Synthetic Construct
AKHAFK

SEQ ID NO: 7359 - protein, 6 aa, ARTIFICIAL SEQUENCE
  Synthetic Construct
AKHAGK

SEQ ID NO: 7360 - protein, 6 aa, ARTIFICIAL SEQUENCE
  Synthetic Construct
AKHAHK

SEQ ID NO: 7361 - protein, 6 aa, ARTIFICIAL SEQUENCE
  Synthetic Construct
AKHAIK

SEQ ID NO: 7362 - protein, 6 aa, ARTIFICIAL SEQUENCE
  Synthetic Construct
AKHALK

SEQ ID NO: 7363 - protein, 6 aa, ARTIFICIAL SEQUENCE
  Synthetic Construct
AKHANK

SEQ ID NO: 7364 - protein, 6 aa, ARTIFICIAL SEQUENCE
  Synthetic Construct
AKHAQK

SEQ ID NO: 7365 - protein, 6 aa, ARTIFICIAL SEQUENCE
  Synthetic Construct
AKHARK

SEQ ID NO: 7366 - protein, 6 aa, ARTIFICIAL SEQUENCE
  Synthetic Construct
AKHASK

SEQ ID NO: 7367 - protein, 6 aa, ARTIFICIAL SEQUENCE
  Synthetic Construct
AKHATK

SEQ ID NO: 7368 - protein, 6 aa, ARTIFICIAL SEQUENCE
  Synthetic Construct
AKHAYK

SEQ ID NO: 7369 - protein, 6 aa, ARTIFICIAL SEQUENCE
  Synthetic Construct
AKHDAK

SEQ ID NO: 7370 - protein, 6 aa, ARTIFICIAL SEQUENCE
  Synthetic Construct
AKHDDK

SEQ ID NO: 7371 - protein, 6 aa, ARTIFICIAL SEQUENCE
  Synthetic Construct
AKHDEK

SEQ ID NO: 7372 - protein, 6 aa, ARTIFICIAL SEQUENCE
  Synthetic Construct
AKHDFK

SEQ ID NO: 7373 - protein, 6 aa, ARTIFICIAL SEQUENCE
  Synthetic Construct
AKHDGK

SEQ ID NO: 7374 - protein, 6 aa, ARTIFICIAL SEQUENCE
  Synthetic Construct
AKHDHK

SEQ ID NO: 7375 - protein, 6 aa, ARTIFICIAL SEQUENCE
  Synthetic Construct
AKHDIK

SEQ ID NO: 7376 - protein, 6 aa, ARTIFICIAL SEQUENCE
  Synthetic Construct
AKHDLK

SEQ ID NO: 7377 - protein, 6 aa, ARTIFICIAL SEQUENCE
  Synthetic Construct
AKHDNK

SEQ ID NO: 7378 - protein, 6 aa, ARTIFICIAL SEQUENCE
  Synthetic Construct
AKHDQK

SEQ ID NO: 7379 - protein, 6 aa, ARTIFICIAL SEQUENCE
  Synthetic Construct
AKHDRK

SEQ ID NO: 7380 - protein, 6 aa, ARTIFICIAL SEQUENCE
  Synthetic Construct
AKHDSK

SEQ ID NO: 7381 - protein, 6 aa, ARTIFICIAL SEQUENCE
  Synthetic Construct
AKHDTK

SEQ ID NO: 7382 - protein, 6 aa, ARTIFICIAL SEQUENCE
  Synthetic Construct
AKHDYK

SEQ ID NO: 7383 - protein, 6 aa, ARTIFICIAL SEQUENCE
  Synthetic Construct
AKHEAK

SEQ ID NO: 7384 - protein, 6 aa, ARTIFICIAL SEQUENCE
  Synthetic Construct
AKHEDK

SEQ ID NO: 7385 - protein, 6 aa, ARTIFICIAL SEQUENCE
  Synthetic Construct
AKHEEK

SEQ ID NO: 7386 - protein, 6 aa, ARTIFICIAL SEQUENCE
  Synthetic Construct
AKHEFK

SEQ ID NO: 7387 - protein, 6 aa, ARTIFICIAL SEQUENCE
  Synthetic Construct
AKHEGK

SEQ ID NO: 7388 - protein, 6 aa, ARTIFICIAL SEQUENCE
  Synthetic Construct
AKHEHK

SEQ ID NO: 7389 - protein, 6 aa, ARTIFICIAL SEQUENCE
  Synthetic Construct
AKHEIK

SEQ ID NO: 7390 - protein, 6 aa, ARTIFICIAL SEQUENCE
  Synthetic Construct
AKHELK

SEQ ID NO: 7391 - protein, 6 aa, ARTIFICIAL SEQUENCE
  Synthetic Construct
AKHENK

SEQ ID NO: 7392 - protein, 6 aa, ARTIFICIAL SEQUENCE
  Synthetic Construct
AKHEQK

SEQ ID NO: 7393 - protein, 6 aa, ARTIFICIAL SEQUENCE
  Synthetic Construct
AKHERK

SEQ ID NO: 7394 - protein, 6 aa, ARTIFICIAL SEQUENCE
  Synthetic Construct
AKHESK

SEQ ID NO: 7395 - protein, 6 aa, ARTIFICIAL SEQUENCE
  Synthetic Construct
AKHETK

SEQ ID NO: 7396 - protein, 6 aa, ARTIFICIAL SEQUENCE
  Synthetic Construct
AKHEYK

SEQ ID NO: 7397 - protein, 6 aa, ARTIFICIAL SEQUENCE
  Synthetic Construct
AKHFAK

SEQ ID NO: 7398 - protein, 6 aa, ARTIFICIAL SEQUENCE
  Synthetic Construct
AKHFDK

SEQ ID NO: 7399 - protein, 6 aa, ARTIFICIAL SEQUENCE
  Synthetic Construct
AKHFEK

SEQ ID NO: 7400 - protein, 6 aa, ARTIFICIAL SEQUENCE
  Synthetic Construct
AKHFFK

SEQ ID NO: 7401 - protein, 6 aa, ARTIFICIAL SEQUENCE
  Synthetic Construct
AKHFGK

SEQ ID NO: 7402 - protein, 6 aa, ARTIFICIAL SEQUENCE
  Synthetic Construct
AKHFHK

SEQ ID NO: 7403 - protein, 6 aa, ARTIFICIAL SEQUENCE
  Synthetic Construct
AKHFIK

SEQ ID NO: 7404 - protein, 6 aa, ARTIFICIAL SEQUENCE
  Synthetic Construct
AKHFLK

SEQ ID NO: 7405 - protein, 6 aa, ARTIFICIAL SEQUENCE
  Synthetic Construct
AKHFNK

SEQ ID NO: 7406 - protein, 6 aa, ARTIFICIAL SEQUENCE
  Synthetic Construct
AKHFQK

SEQ ID NO: 7407 - protein, 6 aa, ARTIFICIAL SEQUENCE
  Synthetic Construct
AKHFRK

SEQ ID NO: 7408 - protein, 6 aa, ARTIFICIAL SEQUENCE
  Synthetic Construct
AKHFSK

SEQ ID NO: 7409 - protein, 6 aa, ARTIFICIAL SEQUENCE
  Synthetic Construct
AKHFTK

SEQ ID NO: 7410 - protein, 6 aa, ARTIFICIAL SEQUENCE
  Synthetic Construct
AKHFYK

SEQ ID NO: 7411 - protein, 6 aa, ARTIFICIAL SEQUENCE
  Synthetic Construct
AKHGAK

SEQ ID NO: 7412 - protein, 6 aa, ARTIFICIAL SEQUENCE
  Synthetic Construct
AKHGDK

SEQ ID NO: 7413 - protein, 6 aa, ARTIFICIAL SEQUENCE
  Synthetic Construct
AKHGEK

SEQ ID NO: 7414 - protein, 6 aa, ARTIFICIAL SEQUENCE
  Synthetic Construct
AKHGFK

SEQ ID NO: 7415 - protein, 6 aa, ARTIFICIAL SEQUENCE
  Synthetic Construct
AKHGGK

SEQ ID NO: 7416 - protein, 6 aa, ARTIFICIAL SEQUENCE
  Synthetic Construct
AKHGHK

SEQ ID NO: 7417 - protein, 6 aa, ARTIFICIAL SEQUENCE
  Synthetic Construct
AKHGIK

SEQ ID NO: 7418 - protein, 6 aa, ARTIFICIAL SEQUENCE
  Synthetic Construct
AKHGLK

SEQ ID NO: 7419 - protein, 6 aa, ARTIFICIAL SEQUENCE
  Synthetic Construct
AKHGNK

SEQ ID NO: 7420 - protein, 6 aa, ARTIFICIAL SEQUENCE
  Synthetic Construct
AKHGQK

SEQ ID NO: 7421 - protein, 6 aa, ARTIFICIAL SEQUENCE
  Synthetic Construct
AKHGRK

SEQ ID NO: 7422 - protein, 6 aa, ARTIFICIAL SEQUENCE
  Synthetic Construct
AKHGSK

SEQ ID NO: 7423 - protein, 6 aa, ARTIFICIAL SEQUENCE
  Synthetic Construct
AKHGTK

SEQ ID NO: 7424 - protein, 6 aa, ARTIFICIAL SEQUENCE
  Synthetic Construct
AKHGYK

SEQ ID NO: 7425 - protein, 6 aa, ARTIFICIAL SEQUENCE
  Synthetic Construct
AKHHAK

SEQ ID NO: 7426 - protein, 6 aa, ARTIFICIAL SEQUENCE
  Synthetic Construct
AKHHDK

SEQ ID NO: 7427 - protein, 6 aa, ARTIFICIAL SEQUENCE
  Synthetic Construct
AKHHEK

SEQ ID NO: 7428 - protein, 6 aa, ARTIFICIAL SEQUENCE
  Synthetic Construct
AKHHFK

SEQ ID NO: 7429 - protein, 6 aa, ARTIFICIAL SEQUENCE
  Synthetic Construct
AKHHGK

SEQ ID NO: 7430 - protein, 6 aa, ARTIFICIAL SEQUENCE
  Synthetic Construct
AKHHHK

SEQ ID NO: 7431 - protein, 6 aa, ARTIFICIAL SEQUENCE
  Synthetic Construct
AKHHIK

SEQ ID NO: 7432 - protein, 6 aa, ARTIFICIAL SEQUENCE
  Synthetic Construct
AKHHLK

SEQ ID NO: 7433 - protein, 6 aa, ARTIFICIAL SEQUENCE
  Synthetic Construct
AKHHNK

SEQ ID NO: 7434 - protein, 6 aa, ARTIFICIAL SEQUENCE
  Synthetic Construct
AKHHQK

SEQ ID NO: 7435 - protein, 6 aa, ARTIFICIAL SEQUENCE
  Synthetic Construct
AKHHRK

SEQ ID NO: 7436 - protein, 6 aa, ARTIFICIAL SEQUENCE
  Synthetic Construct
AKHHSK

SEQ ID NO: 7437 - protein, 6 aa, ARTIFICIAL SEQUENCE
  Synthetic Construct
AKHHTK

SEQ ID NO: 7438 - protein, 6 aa, ARTIFICIAL SEQUENCE
  Synthetic Construct
AKHHYK

SEQ ID NO: 7439 - protein, 6 aa, ARTIFICIAL SEQUENCE
  Synthetic Construct
AKHIAK

SEQ ID NO: 7440 - protein, 6 aa, ARTIFICIAL SEQUENCE
  Synthetic Construct
AKHIDK

SEQ ID NO: 7441 - protein, 6 aa, ARTIFICIAL SEQUENCE
  Synthetic Construct
AKHIEK

SEQ ID NO: 7442 - protein, 6 aa, ARTIFICIAL SEQUENCE
  Synthetic Construct
AKHIFK

SEQ ID NO: 7443 - protein, 6 aa, ARTIFICIAL SEQUENCE
  Synthetic Construct
AKHIGK

SEQ ID NO: 7444 - protein, 6 aa, ARTIFICIAL SEQUENCE
  Synthetic Construct
AKHIHK

SEQ ID NO: 7445 - protein, 6 aa, ARTIFICIAL SEQUENCE
  Synthetic Construct
AKHIIK

SEQ ID NO: 7446 - protein, 6 aa, ARTIFICIAL SEQUENCE
  Synthetic Construct
AKHILK

SEQ ID NO: 7447 - protein, 6 aa, ARTIFICIAL SEQUENCE
  Synthetic Construct
AKHINK

SEQ ID NO: 7448 - protein, 6 aa, ARTIFICIAL SEQUENCE
  Synthetic Construct
AKHIQK

SEQ ID NO: 7449 - protein, 6 aa, ARTIFICIAL SEQUENCE
  Synthetic Construct
AKHIRK

SEQ ID NO: 7450 - protein, 6 aa, ARTIFICIAL SEQUENCE
  Synthetic Construct
AKHISK

SEQ ID NO: 7451 - protein, 6 aa, ARTIFICIAL SEQUENCE
  Synthetic Construct
AKHITK

SEQ ID NO: 7452 - protein, 6 aa, ARTIFICIAL SEQUENCE
  Synthetic Construct
AKHIYK

SEQ ID NO: 7453 - protein, 6 aa, ARTIFICIAL SEQUENCE
  Synthetic Construct
AKHLAK

SEQ ID NO: 7454 - protein, 6 aa, ARTIFICIAL SEQUENCE
  Synthetic Construct
AKHLDK

SEQ ID NO: 7455 - protein, 6 aa, ARTIFICIAL SEQUENCE
  Synthetic Construct
AKHLEK

SEQ ID NO: 7456 - protein, 6 aa, ARTIFICIAL SEQUENCE
  Synthetic Construct
AKHLFK

SEQ ID NO: 7457 - protein, 6 aa, ARTIFICIAL SEQUENCE
  Synthetic Construct
AKHLGK

SEQ ID NO: 7458 - protein, 6 aa, ARTIFICIAL SEQUENCE
  Synthetic Construct
AKHLHK

SEQ ID NO: 7459 - protein, 6 aa, ARTIFICIAL SEQUENCE
  Synthetic Construct
AKHLIK

SEQ ID NO: 7460 - protein, 6 aa, ARTIFICIAL SEQUENCE
  Synthetic Construct
AKHLLK

SEQ ID NO: 7461 - protein, 6 aa, ARTIFICIAL SEQUENCE
  Synthetic Construct
AKHLNK

SEQ ID NO: 7462 - protein, 6 aa, ARTIFICIAL SEQUENCE
  Synthetic Construct
AKHLQK

SEQ ID NO: 7463 - protein, 6 aa, ARTIFICIAL SEQUENCE
  Synthetic Construct
AKHLRK

SEQ ID NO: 7464 - protein, 6 aa, ARTIFICIAL SEQUENCE
  Synthetic Construct
AKHLSK

SEQ ID NO: 7465 - protein, 6 aa, ARTIFICIAL SEQUENCE
  Synthetic Construct
AKHLTK

SEQ ID NO: 7466 - protein, 6 aa, ARTIFICIAL SEQUENCE
  Synthetic Construct
AKHLYK

SEQ ID NO: 7467 - protein, 6 aa, ARTIFICIAL SEQUENCE
  Synthetic Construct
AKHNAK

SEQ ID NO: 7468 - protein, 6 aa, ARTIFICIAL SEQUENCE
  Synthetic Construct
AKHNDK

SEQ ID NO: 7469 - protein, 6 aa, ARTIFICIAL SEQUENCE
  Synthetic Construct
AKHNEK

SEQ ID NO: 7470 - protein, 6 aa, ARTIFICIAL SEQUENCE
  Synthetic Construct
AKHNFK

SEQ ID NO: 7471 - protein, 6 aa, ARTIFICIAL SEQUENCE
  Synthetic Construct
AKHNGK

SEQ ID NO: 7472 - protein, 6 aa, ARTIFICIAL SEQUENCE
  Synthetic Construct
AKHNHK

SEQ ID NO: 7473 - protein, 6 aa, ARTIFICIAL SEQUENCE
  Synthetic Construct
AKHNIK

SEQ ID NO: 7474 - protein, 6 aa, ARTIFICIAL SEQUENCE
  Synthetic Construct
AKHNLK

SEQ ID NO: 7475 - protein, 6 aa, ARTIFICIAL SEQUENCE
  Synthetic Construct
AKHNNK

SEQ ID NO: 7476 - protein, 6 aa, ARTIFICIAL SEQUENCE
  Synthetic Construct
AKHNQK

SEQ ID NO: 7477 - protein, 6 aa, ARTIFICIAL SEQUENCE
  Synthetic Construct
AKHNRK

SEQ ID NO: 7478 - protein, 6 aa, ARTIFICIAL SEQUENCE
  Synthetic Construct
AKHNSK

SEQ ID NO: 7479 - protein, 6 aa, ARTIFICIAL SEQUENCE
  Synthetic Construct
AKHNTK

SEQ ID NO: 7480 - protein, 6 aa, ARTIFICIAL SEQUENCE
  Synthetic Construct
AKHNYK

SEQ ID NO: 7481 - protein, 6 aa, ARTIFICIAL SEQUENCE
  Synthetic Construct
AKHQAK

SEQ ID NO: 7482 - protein, 6 aa, ARTIFICIAL SEQUENCE
  Synthetic Construct
AKHQDK

SEQ ID NO: 7483 - protein, 6 aa, ARTIFICIAL SEQUENCE
  Synthetic Construct
AKHQEK

SEQ ID NO: 7484 - protein, 6 aa, ARTIFICIAL SEQUENCE
  Synthetic Construct
AKHQFK

SEQ ID NO: 7485 - protein, 6 aa, ARTIFICIAL SEQUENCE
  Synthetic Construct
AKHQGK

SEQ ID NO: 7486 - protein, 6 aa, ARTIFICIAL SEQUENCE
  Synthetic Construct
AKHQHK

SEQ ID NO: 7487 - protein, 6 aa, ARTIFICIAL SEQUENCE
  Synthetic Construct
AKHQIK

SEQ ID NO: 7488 - protein, 6 aa, ARTIFICIAL SEQUENCE
  Synthetic Construct
AKHQLK

SEQ ID NO: 7489 - protein, 6 aa, ARTIFICIAL SEQUENCE
  Synthetic Construct
AKHQNK

SEQ ID NO: 7490 - protein, 6 aa, ARTIFICIAL SEQUENCE
  Synthetic Construct
AKHQQK

SEQ ID NO: 7491 - protein, 6 aa, ARTIFICIAL SEQUENCE
  Synthetic Construct
AKHQRK

SEQ ID NO: 7492 - protein, 6 aa, ARTIFICIAL SEQUENCE
  Synthetic Construct
AKHQSK

SEQ ID NO: 7493 - protein, 6 aa, ARTIFICIAL SEQUENCE
  Synthetic Construct
AKHQTK

SEQ ID NO: 7494 - protein, 6 aa, ARTIFICIAL SEQUENCE
  Synthetic Construct
AKHQYK

SEQ ID NO: 7495 - protein, 6 aa, ARTIFICIAL SEQUENCE
  Synthetic Construct
AKHRAK

SEQ ID NO: 7496 - protein, 6 aa, ARTIFICIAL SEQUENCE
  Synthetic Construct
AKHRDK

SEQ ID NO: 7497 - protein, 6 aa, ARTIFICIAL SEQUENCE
  Synthetic Construct
AKHREK

SEQ ID NO: 7498 - protein, 6 aa, ARTIFICIAL SEQUENCE
  Synthetic Construct
AKHRFK

SEQ ID NO: 7499 - protein, 6 aa, ARTIFICIAL SEQUENCE
  Synthetic Construct
AKHRGK

SEQ ID NO: 7500 - protein, 6 aa, ARTIFICIAL SEQUENCE
  Synthetic Construct
AKHRHK

SEQ ID NO: 7501 - protein, 6 aa, ARTIFICIAL SEQUENCE
  Synthetic Construct
AKHRIK

SEQ ID NO: 7502 - protein, 6 aa, ARTIFICIAL SEQUENCE
  Synthetic Construct
AKHRLK

SEQ ID NO: 7503 - protein, 6 aa, ARTIFICIAL SEQUENCE
  Synthetic Construct
AKHRNK

SEQ ID NO: 7504 - protein, 6 aa, ARTIFICIAL SEQUENCE
  Synthetic Construct
AKHRQK

SEQ ID NO: 7505 - protein, 6 aa, ARTIFICIAL SEQUENCE
  Synthetic Construct
AKHRRK

SEQ ID NO: 7506 - protein, 6 aa, ARTIFICIAL SEQUENCE
  Synthetic Construct
AKHRSK

SEQ ID NO: 7507 - protein, 6 aa, ARTIFICIAL SEQUENCE
  Synthetic Construct
AKHRTK

SEQ ID NO: 7508 - protein, 6 aa, ARTIFICIAL SEQUENCE
  Synthetic Construct
AKHRYK

SEQ ID NO: 7509 - protein, 6 aa, ARTIFICIAL SEQUENCE
  Synthetic Construct
AKHSAK

SEQ ID NO: 7510 - protein, 6 aa, ARTIFICIAL SEQUENCE
  Synthetic Construct
AKHSDK

SEQ ID NO: 7511 - protein, 6 aa, ARTIFICIAL SEQUENCE
  Synthetic Construct
AKHSEK

SEQ ID NO: 7512 - protein, 6 aa, ARTIFICIAL SEQUENCE
  Synthetic Construct
AKHSFK

SEQ ID NO: 7513 - protein, 6 aa, ARTIFICIAL SEQUENCE
  Synthetic Construct
AKHSGK

SEQ ID NO: 7514 - protein, 6 aa, ARTIFICIAL SEQUENCE
  Synthetic Construct
AKHSHK

SEQ ID NO: 7515 - protein, 6 aa, ARTIFICIAL SEQUENCE
  Synthetic Construct
AKHSIK

SEQ ID NO: 7516 - protein, 6 aa, ARTIFICIAL SEQUENCE
  Synthetic Construct
AKHSLK

SEQ ID NO: 7517 - protein, 6 aa, ARTIFICIAL SEQUENCE
  Synthetic Construct
AKHSNK

SEQ ID NO: 7518 - protein, 6 aa, ARTIFICIAL SEQUENCE
  Synthetic Construct
AKHSQK

SEQ ID NO: 7519 - protein, 6 aa, ARTIFICIAL SEQUENCE
  Synthetic Construct
AKHSRK

SEQ ID NO: 7520 - protein, 6 aa, ARTIFICIAL SEQUENCE
  Synthetic Construct
AKHSSK

SEQ ID NO: 7521 - protein, 6 aa, ARTIFICIAL SEQUENCE
  Synthetic Construct
AKHSTK

SEQ ID NO: 7522 - protein, 6 aa, ARTIFICIAL SEQUENCE
  Synthetic Construct
AKHSYK

SEQ ID NO: 7523 - protein, 6 aa, ARTIFICIAL SEQUENCE
  Synthetic Construct
AKHTAK

SEQ ID NO: 7524 - protein, 6 aa, ARTIFICIAL SEQUENCE
  Synthetic Construct
AKHTDK

SEQ ID NO: 7525 - protein, 6 aa, ARTIFICIAL SEQUENCE
  Synthetic Construct
AKHTEK

SEQ ID NO: 7526 - protein, 6 aa, ARTIFICIAL SEQUENCE
  Synthetic Construct
AKHTFK

SEQ ID NO: 7527 - protein, 6 aa, ARTIFICIAL SEQUENCE
  Synthetic Construct
AKHTGK

SEQ ID NO: 7528 - protein, 6 aa, ARTIFICIAL SEQUENCE
  Synthetic Construct
AKHTHK

SEQ ID NO: 7529 - protein, 6 aa, ARTIFICIAL SEQUENCE
  Synthetic Construct
AKHTIK

SEQ ID NO: 7530 - protein, 6 aa, ARTIFICIAL SEQUENCE
  Synthetic Construct
AKHTLK

SEQ ID NO: 7531 - protein, 6 aa, ARTIFICIAL SEQUENCE
  Synthetic Construct
AKHTNK

SEQ ID NO: 7532 - protein, 6 aa, ARTIFICIAL SEQUENCE
  Synthetic Construct
AKHTQK

SEQ ID NO: 7533 - protein, 6 aa, ARTIFICIAL SEQUENCE
  Synthetic Construct
AKHTRK

SEQ ID NO: 7534 - protein, 6 aa, ARTIFICIAL SEQUENCE
  Synthetic Construct
AKHTSK

SEQ ID NO: 7535 - protein, 6 aa, ARTIFICIAL SEQUENCE
  Synthetic Construct
AKHTTK

SEQ ID NO: 7536 - protein, 6 aa, ARTIFICIAL SEQUENCE
  Synthetic Construct
AKHTYK

SEQ ID NO: 7537 - protein, 6 aa, ARTIFICIAL SEQUENCE
  Synthetic Construct
AKHYAK

SEQ ID NO: 7538 - protein, 6 aa, ARTIFICIAL SEQUENCE
  Synthetic Construct
AKHYDK

SEQ ID NO: 7539 - protein, 6 aa, ARTIFICIAL SEQUENCE
  Synthetic Construct
AKHYEK

SEQ ID NO: 7540 - protein, 6 aa, ARTIFICIAL SEQUENCE
  Synthetic Construct
AKHYFK

SEQ ID NO: 7541 - protein, 6 aa, ARTIFICIAL SEQUENCE
  Synthetic Construct
AKHYGK

SEQ ID NO: 7542 - protein, 6 aa, ARTIFICIAL SEQUENCE
  Synthetic Construct
AKHYHK

SEQ ID NO: 7543 - protein, 6 aa, ARTIFICIAL SEQUENCE
  Synthetic Construct
AKHYIK

SEQ ID NO: 7544 - protein, 6 aa, ARTIFICIAL SEQUENCE
  Synthetic Construct
AKHYLK

SEQ ID NO: 7545 - protein, 6 aa, ARTIFICIAL SEQUENCE
  Synthetic Construct
AKHYNK

SEQ ID NO: 7546 - protein, 6 aa, ARTIFICIAL SEQUENCE
  Synthetic Construct
AKHYQK

SEQ ID NO: 7547 - protein, 6 aa, ARTIFICIAL SEQUENCE
  Synthetic Construct
AKHYRK

SEQ ID NO: 7548 - protein, 6 aa, ARTIFICIAL SEQUENCE
  Synthetic Construct
AKHYSK

SEQ ID NO: 7549 - protein, 6 aa, ARTIFICIAL SEQUENCE
  Synthetic Construct
AKHYTK

SEQ ID NO: 7550 - protein, 6 aa, ARTIFICIAL SEQUENCE
  Synthetic Construct
AKHYYK

SEQ ID NO: 7551 - protein, 6 aa, ARTIFICIAL SEQUENCE
  Synthetic Construct
AKIAAK

SEQ ID NO: 7552 - protein, 6 aa, ARTIFICIAL SEQUENCE
  Synthetic Construct
AKIADK

SEQ ID NO: 7553 - protein, 6 aa, ARTIFICIAL SEQUENCE
  Synthetic Construct
AKIAEK

SEQ ID NO: 7554 - protein, 6 aa, ARTIFICIAL SEQUENCE
  Synthetic Construct
AKIAFK

SEQ ID NO: 7555 - protein, 6 aa, ARTIFICIAL SEQUENCE
  Synthetic Construct
AKIAGK

SEQ ID NO: 7556 - protein, 6 aa, ARTIFICIAL SEQUENCE
  Synthetic Construct
AKIAHK

SEQ ID NO: 7557 - protein, 6 aa, ARTIFICIAL SEQUENCE
  Synthetic Construct
AKIAIK

SEQ ID NO: 7558 - protein, 6 aa, ARTIFICIAL SEQUENCE
  Synthetic Construct
AKIALK

SEQ ID NO: 7559 - protein, 6 aa, ARTIFICIAL SEQUENCE
  Synthetic Construct
AKIANK

SEQ ID NO: 7560 - protein, 6 aa, ARTIFICIAL SEQUENCE
  Synthetic Construct
AKIAQK

SEQ ID NO: 7561 - protein, 6 aa, ARTIFICIAL SEQUENCE
  Synthetic Construct
AKIARK

SEQ ID NO: 7562 - protein, 6 aa, ARTIFICIAL SEQUENCE
  Synthetic Construct
AKIASK

SEQ ID NO: 7563 - protein, 6 aa, ARTIFICIAL SEQUENCE
  Synthetic Construct
AKIATK

SEQ ID NO: 7564 - protein, 6 aa, ARTIFICIAL SEQUENCE
  Synthetic Construct
AKIAYK

SEQ ID NO: 7565 - protein, 6 aa, ARTIFICIAL SEQUENCE
  Synthetic Construct
AKIDAK

SEQ ID NO: 7566 - protein, 6 aa, ARTIFICIAL SEQUENCE
  Synthetic Construct
AKIDDK

SEQ ID NO: 7567 - protein, 6 aa, ARTIFICIAL SEQUENCE
  Synthetic Construct
AKIDEK

SEQ ID NO: 7568 - protein, 6 aa, ARTIFICIAL SEQUENCE
  Synthetic Construct
AKIDFK

SEQ ID NO: 7569 - protein, 6 aa, ARTIFICIAL SEQUENCE
  Synthetic Construct
AKIDGK

SEQ ID NO: 7570 - protein, 6 aa, ARTIFICIAL SEQUENCE
  Synthetic Construct
AKIDHK

SEQ ID NO: 7571 - protein, 6 aa, ARTIFICIAL SEQUENCE
  Synthetic Construct
AKIDIK

SEQ ID NO: 7572 - protein, 6 aa, ARTIFICIAL SEQUENCE
  Synthetic Construct
AKIDLK

SEQ ID NO: 7573 - protein, 6 aa, ARTIFICIAL SEQUENCE
  Synthetic Construct
AKIDNK

SEQ ID NO: 7574 - protein, 6 aa, ARTIFICIAL SEQUENCE
  Synthetic Construct
AKIDQK

SEQ ID NO: 7575 - protein, 6 aa, ARTIFICIAL SEQUENCE
  Synthetic Construct
AKIDRK

SEQ ID NO: 7576 - protein, 6 aa, ARTIFICIAL SEQUENCE
  Synthetic Construct
AKIDSK

SEQ ID NO: 7577 - protein, 6 aa, ARTIFICIAL SEQUENCE
  Synthetic Construct
AKIDTK

SEQ ID NO: 7578 - protein, 6 aa, ARTIFICIAL SEQUENCE
  Synthetic Construct
AKIDYK

SEQ ID NO: 7579 - protein, 6 aa, ARTIFICIAL SEQUENCE
  Synthetic Construct
AKIEAK

SEQ ID NO: 7580 - protein, 6 aa, ARTIFICIAL SEQUENCE
  Synthetic Construct
AKIEDK

SEQ ID NO: 7581 - protein, 6 aa, ARTIFICIAL SEQUENCE
  Synthetic Construct
AKIEEK

SEQ ID NO: 7582 - protein, 6 aa, ARTIFICIAL SEQUENCE
  Synthetic Construct
AKIEFK

SEQ ID NO: 7583 - protein, 6 aa, ARTIFICIAL SEQUENCE
  Synthetic Construct
AKIEGK

SEQ ID NO: 7584 - protein, 6 aa, ARTIFICIAL SEQUENCE
  Synthetic Construct
AKIEHK

SEQ ID NO: 7585 - protein, 6 aa, ARTIFICIAL SEQUENCE
  Synthetic Construct
AKIEIK

SEQ ID NO: 7586 - protein, 6 aa, ARTIFICIAL SEQUENCE
  Synthetic Construct
AKIELK

SEQ ID NO: 7587 - protein, 6 aa, ARTIFICIAL SEQUENCE
  Synthetic Construct
AKIENK

SEQ ID NO: 7588 - protein, 6 aa, ARTIFICIAL SEQUENCE
  Synthetic Construct
AKIEQK

SEQ ID NO: 7589 - protein, 6 aa, ARTIFICIAL SEQUENCE
  Synthetic Construct
AKIERK

SEQ ID NO: 7590 - protein, 6 aa, ARTIFICIAL SEQUENCE
  Synthetic Construct
AKIESK

SEQ ID NO: 7591 - protein, 6 aa, ARTIFICIAL SEQUENCE
  Synthetic Construct
AKIETK

SEQ ID NO: 7592 - protein, 6 aa, ARTIFICIAL SEQUENCE
  Synthetic Construct
AKIEYK

SEQ ID NO: 7593 - protein, 6 aa, ARTIFICIAL SEQUENCE
  Synthetic Construct
AKIFAK

SEQ ID NO: 7594 - protein, 6 aa, ARTIFICIAL SEQUENCE
  Synthetic Construct
AKIFDK

SEQ ID NO: 7595 - protein, 6 aa, ARTIFICIAL SEQUENCE
  Synthetic Construct
AKIFEK

SEQ ID NO: 7596 - protein, 6 aa, ARTIFICIAL SEQUENCE
  Synthetic Construct
AKIFFK

SEQ ID NO: 7597 - protein, 6 aa, ARTIFICIAL SEQUENCE
  Synthetic Construct
AKIFGK

SEQ ID NO: 7598 - protein, 6 aa, ARTIFICIAL SEQUENCE
  Synthetic Construct
AKIFHK

SEQ ID NO: 7599 - protein, 6 aa, ARTIFICIAL SEQUENCE
  Synthetic Construct
AKIFIK

SEQ ID NO: 7600 - protein, 6 aa, ARTIFICIAL SEQUENCE
  Synthetic Construct
AKIFLK

SEQ ID NO: 7601 - protein, 6 aa, ARTIFICIAL SEQUENCE
  Synthetic Construct
AKIFNK

SEQ ID NO: 7602 - protein, 6 aa, ARTIFICIAL SEQUENCE
  Synthetic Construct
AKIFQK

SEQ ID NO: 7603 - protein, 6 aa, ARTIFICIAL SEQUENCE
  Synthetic Construct
AKIFRK

SEQ ID NO: 7604 - protein, 6 aa, ARTIFICIAL SEQUENCE
  Synthetic Construct
AKIFSK

SEQ ID NO: 7605 - protein, 6 aa, ARTIFICIAL SEQUENCE
  Synthetic Construct
AKIFTK

SEQ ID NO: 7606 - protein, 6 aa, ARTIFICIAL SEQUENCE
  Synthetic Construct
AKIFYK

SEQ ID NO: 7607 - protein, 6 aa, ARTIFICIAL SEQUENCE
  Synthetic Construct
AKIGAK

SEQ ID NO: 7608 - protein, 6 aa, ARTIFICIAL SEQUENCE
  Synthetic Construct
AKIGDK

SEQ ID NO: 7609 - protein, 6 aa, ARTIFICIAL SEQUENCE
  Synthetic Construct
AKIGEK

SEQ ID NO: 7610 - protein, 6 aa, ARTIFICIAL SEQUENCE
  Synthetic Construct
AKIGFK

SEQ ID NO: 7611 - protein, 6 aa, ARTIFICIAL SEQUENCE
  Synthetic Construct
AKIGGK

SEQ ID NO: 7612 - protein, 6 aa, ARTIFICIAL SEQUENCE
  Synthetic Construct
AKIGHK

SEQ ID NO: 7613 - protein, 6 aa, ARTIFICIAL SEQUENCE
  Synthetic Construct
AKIGIK

SEQ ID NO: 7614 - protein, 6 aa, ARTIFICIAL SEQUENCE
  Synthetic Construct
AKIGLK

SEQ ID NO: 7615 - protein, 6 aa, ARTIFICIAL SEQUENCE
  Synthetic Construct
AKIGNK

SEQ ID NO: 7616 - protein, 6 aa, ARTIFICIAL SEQUENCE
  Synthetic Construct
AKIGQK

SEQ ID NO: 7617 - protein, 6 aa, ARTIFICIAL SEQUENCE
  Synthetic Construct
AKIGRK

SEQ ID NO: 7618 - protein, 6 aa, ARTIFICIAL SEQUENCE
  Synthetic Construct
AKIGSK

SEQ ID NO: 7619 - protein, 6 aa, ARTIFICIAL SEQUENCE
  Synthetic Construct
AKIGTK

SEQ ID NO: 7620 - protein, 6 aa, ARTIFICIAL SEQUENCE
  Synthetic Construct
AKIGYK

SEQ ID NO: 7621 - protein, 6 aa, ARTIFICIAL SEQUENCE
  Synthetic Construct
AKIHAK

SEQ ID NO: 7622 - protein, 6 aa, ARTIFICIAL SEQUENCE
  Synthetic Construct
AKIHDK

SEQ ID NO: 7623 - protein, 6 aa, ARTIFICIAL SEQUENCE
  Synthetic Construct
AKIHEK

SEQ ID NO: 7624 - protein, 6 aa, ARTIFICIAL SEQUENCE
  Synthetic Construct
AKIHFK

SEQ ID NO: 7625 - protein, 6 aa, ARTIFICIAL SEQUENCE
  Synthetic Construct
AKIHGK

SEQ ID NO: 7626 - protein, 6 aa, ARTIFICIAL SEQUENCE
  Synthetic Construct
AKIHHK

SEQ ID NO: 7627 - protein, 6 aa, ARTIFICIAL SEQUENCE
  Synthetic Construct
AKIHIK

SEQ ID NO: 7628 - protein, 6 aa, ARTIFICIAL SEQUENCE
  Synthetic Construct
AKIHLK

SEQ ID NO: 7629 - protein, 6 aa, ARTIFICIAL SEQUENCE
  Synthetic Construct
AKIHNK

SEQ ID NO: 7630 - protein, 6 aa, ARTIFICIAL SEQUENCE
  Synthetic Construct
AKIHQK

SEQ ID NO: 7631 - protein, 6 aa, ARTIFICIAL SEQUENCE
  Synthetic Construct
AKIHRK

SEQ ID NO: 7632 - protein, 6 aa, ARTIFICIAL SEQUENCE
  Synthetic Construct
AKIHSK

SEQ ID NO: 7633 - protein, 6 aa, ARTIFICIAL SEQUENCE
  Synthetic Construct
AKIHTK

SEQ ID NO: 7634 - protein, 6 aa, ARTIFICIAL SEQUENCE
  Synthetic Construct
AKIHYK

SEQ ID NO: 7635 - protein, 6 aa, ARTIFICIAL SEQUENCE
  Synthetic Construct
AKIIAK

SEQ ID NO: 7636 - protein, 6 aa, ARTIFICIAL SEQUENCE
  Synthetic Construct
AKIIDK

SEQ ID NO: 7637 - protein, 6 aa, ARTIFICIAL SEQUENCE
  Synthetic Construct
AKIIEK

SEQ ID NO: 7638 - protein, 6 aa, ARTIFICIAL SEQUENCE
  Synthetic Construct
AKIIFK

SEQ ID NO: 7639 - protein, 6 aa, ARTIFICIAL SEQUENCE
  Synthetic Construct
AKIIGK

SEQ ID NO: 7640 - protein, 6 aa, ARTIFICIAL SEQUENCE
  Synthetic Construct
AKIIHK

SEQ ID NO: 7641 - protein, 6 aa, ARTIFICIAL SEQUENCE
  Synthetic Construct
AKIIIK

SEQ ID NO: 7642 - protein, 6 aa, ARTIFICIAL SEQUENCE
  Synthetic Construct
AKIILK

SEQ ID NO: 7643 - protein, 6 aa, ARTIFICIAL SEQUENCE
  Synthetic Construct
AKIINK

SEQ ID NO: 7644 - protein, 6 aa, ARTIFICIAL SEQUENCE
  Synthetic Construct
AKIIQK

SEQ ID NO: 7645 - protein, 6 aa, ARTIFICIAL SEQUENCE
  Synthetic Construct
AKIIRK

SEQ ID NO: 7646 - protein, 6 aa, ARTIFICIAL SEQUENCE
  Synthetic Construct
AKIISK

SEQ ID NO: 7647 - protein, 6 aa, ARTIFICIAL SEQUENCE
  Synthetic Construct
AKIITK

SEQ ID NO: 7648 - protein, 6 aa, ARTIFICIAL SEQUENCE
  Synthetic Construct
AKIIYK

SEQ ID NO: 7649 - protein, 6 aa, ARTIFICIAL SEQUENCE
  Synthetic Construct
AKILAK

SEQ ID NO: 7650 - protein, 6 aa, ARTIFICIAL SEQUENCE
  Synthetic Construct
AKILDK

SEQ ID NO: 7651 - protein, 6 aa, ARTIFICIAL SEQUENCE
  Synthetic Construct
AKILEK

SEQ ID NO: 7652 - protein, 6 aa, ARTIFICIAL SEQUENCE
  Synthetic Construct
AKILFK

SEQ ID NO: 7653 - protein, 6 aa, ARTIFICIAL SEQUENCE
  Synthetic Construct
AKILGK

SEQ ID NO: 7654 - protein, 6 aa, ARTIFICIAL SEQUENCE
  Synthetic Construct
AKILHK

SEQ ID NO: 7655 - protein, 6 aa, ARTIFICIAL SEQUENCE
  Synthetic Construct
AKILIK

SEQ ID NO: 7656 - protein, 6 aa, ARTIFICIAL SEQUENCE
  Synthetic Construct
AKILLK

SEQ ID NO: 7657 - protein, 6 aa, ARTIFICIAL SEQUENCE
  Synthetic Construct
AKILNK

SEQ ID NO: 7658 - protein, 6 aa, ARTIFICIAL SEQUENCE
  Synthetic Construct
AKILQK

SEQ ID NO: 7659 - protein, 6 aa, ARTIFICIAL SEQUENCE
  Synthetic Construct
AKILRK

SEQ ID NO: 7660 - protein, 6 aa, ARTIFICIAL SEQUENCE
  Synthetic Construct
AKILSK

SEQ ID NO: 7661 - protein, 6 aa, ARTIFICIAL SEQUENCE
  Synthetic Construct
AKILTK

SEQ ID NO: 7662 - protein, 6 aa, ARTIFICIAL SEQUENCE
  Synthetic Construct
AKILYK

SEQ ID NO: 7663 - protein, 6 aa, ARTIFICIAL SEQUENCE
  Synthetic Construct
AKINAK

SEQ ID NO: 7664 - protein, 6 aa, ARTIFICIAL SEQUENCE
  Synthetic Construct
AKINDK

SEQ ID NO: 7665 - protein, 6 aa, ARTIFICIAL SEQUENCE
  Synthetic Construct
AKINEK

SEQ ID NO: 7666 - protein, 6 aa, ARTIFICIAL SEQUENCE
  Synthetic Construct
AKINFK

SEQ ID NO: 7667 - protein, 6 aa, ARTIFICIAL SEQUENCE
  Synthetic Construct
AKINGK

SEQ ID NO: 7668 - protein, 6 aa, ARTIFICIAL SEQUENCE
  Synthetic Construct
AKINHK

SEQ ID NO: 7669 - protein, 6 aa, ARTIFICIAL SEQUENCE
  Synthetic Construct
AKINIK

SEQ ID NO: 7670 - protein, 6 aa, ARTIFICIAL SEQUENCE
  Synthetic Construct
AKINLK

SEQ ID NO: 7671 - protein, 6 aa, ARTIFICIAL SEQUENCE
  Synthetic Construct
AKINNK

SEQ ID NO: 7672 - protein, 6 aa, ARTIFICIAL SEQUENCE
  Synthetic Construct
AKINQK

SEQ ID NO: 7673 - protein, 6 aa, ARTIFICIAL SEQUENCE
  Synthetic Construct
AKINRK

SEQ ID NO: 7674 - protein, 6 aa, ARTIFICIAL SEQUENCE
  Synthetic Construct
AKINSK

SEQ ID NO: 7675 - protein, 6 aa, ARTIFICIAL SEQUENCE
  Synthetic Construct
AKINTK

SEQ ID NO: 7676 - protein, 6 aa, ARTIFICIAL SEQUENCE
  Synthetic Construct
AKINYK

SEQ ID NO: 7677 - protein, 6 aa, ARTIFICIAL SEQUENCE
  Synthetic Construct
AKIQAK

SEQ ID NO: 7678 - protein, 6 aa, ARTIFICIAL SEQUENCE
  Synthetic Construct
AKIQDK

SEQ ID NO: 7679 - protein, 6 aa, ARTIFICIAL SEQUENCE
  Synthetic Construct
AKIQEK

SEQ ID NO: 7680 - protein, 6 aa, ARTIFICIAL SEQUENCE
  Synthetic Construct
AKIQFK

SEQ ID NO: 7681 - protein, 6 aa, ARTIFICIAL SEQUENCE
  Synthetic Construct
AKIQGK

SEQ ID NO: 7682 - protein, 6 aa, ARTIFICIAL SEQUENCE
  Synthetic Construct
AKIQHK

SEQ ID NO: 7683 - protein, 6 aa, ARTIFICIAL SEQUENCE
  Synthetic Construct
AKIQIK

SEQ ID NO: 7684 - protein, 6 aa, ARTIFICIAL SEQUENCE
  Synthetic Construct
AKIQLK

SEQ ID NO: 7685 - protein, 6 aa, ARTIFICIAL SEQUENCE
  Synthetic Construct
AKIQNK

SEQ ID NO: 7686 - protein, 6 aa, ARTIFICIAL SEQUENCE
  Synthetic Construct
AKIQQK

SEQ ID NO: 7687 - protein, 6 aa, ARTIFICIAL SEQUENCE
  Synthetic Construct
AKIQRK

SEQ ID NO: 7688 - protein, 6 aa, ARTIFICIAL SEQUENCE
  Synthetic Construct
AKIQSK

SEQ ID NO: 7689 - protein, 6 aa, ARTIFICIAL SEQUENCE
  Synthetic Construct
AKIQTK

SEQ ID NO: 7690 - protein, 6 aa, ARTIFICIAL SEQUENCE
  Synthetic Construct
AKIQYK

SEQ ID NO: 7691 - protein, 6 aa, ARTIFICIAL SEQUENCE
  Synthetic Construct
AKIRAK

SEQ ID NO: 7692 - protein, 6 aa, ARTIFICIAL SEQUENCE
  Synthetic Construct
AKIRDK

SEQ ID NO: 7693 - protein, 6 aa, ARTIFICIAL SEQUENCE
  Synthetic Construct
AKIREK

SEQ ID NO: 7694 - protein, 6 aa, ARTIFICIAL SEQUENCE
  Synthetic Construct
AKIRFK

SEQ ID NO: 7695 - protein, 6 aa, ARTIFICIAL SEQUENCE
  Synthetic Construct
AKIRGK

SEQ ID NO: 7696 - protein, 6 aa, ARTIFICIAL SEQUENCE
  Synthetic Construct
AKIRHK

SEQ ID NO: 7697 - protein, 6 aa, ARTIFICIAL SEQUENCE
  Synthetic Construct
AKIRIK

SEQ ID NO: 7698 - protein, 6 aa, ARTIFICIAL SEQUENCE
  Synthetic Construct
AKIRLK

SEQ ID NO: 7699 - protein, 6 aa, ARTIFICIAL SEQUENCE
  Synthetic Construct
AKIRNK

SEQ ID NO: 7700 - protein, 6 aa, ARTIFICIAL SEQUENCE
  Synthetic Construct
AKIRQK

SEQ ID NO: 7701 - protein, 6 aa, ARTIFICIAL SEQUENCE
  Synthetic Construct
AKIRRK

SEQ ID NO: 7702 - protein, 6 aa, ARTIFICIAL SEQUENCE
  Synthetic Construct
AKIRSK

SEQ ID NO: 7703 - protein, 6 aa, ARTIFICIAL SEQUENCE
  Synthetic Construct
AKIRTK

SEQ ID NO: 7704 - protein, 6 aa, ARTIFICIAL SEQUENCE
  Synthetic Construct
AKIRYK

SEQ ID NO: 7705 - protein, 6 aa, ARTIFICIAL SEQUENCE
  Synthetic Construct
AKISAK

SEQ ID NO: 7706 - protein, 6 aa, ARTIFICIAL SEQUENCE
  Synthetic Construct
AKISDK

SEQ ID NO: 7707 - protein, 6 aa, ARTIFICIAL SEQUENCE
  Synthetic Construct
AKISEK

SEQ ID NO: 7708 - protein, 6 aa, ARTIFICIAL SEQUENCE
  Synthetic Construct
AKISFK

SEQ ID NO: 7709 - protein, 6 aa, ARTIFICIAL SEQUENCE
  Synthetic Construct
AKISGK

SEQ ID NO: 7710 - protein, 6 aa, ARTIFICIAL SEQUENCE
  Synthetic Construct
AKISHK

SEQ ID NO: 7711 - protein, 6 aa, ARTIFICIAL SEQUENCE
  Synthetic Construct
AKISIK

SEQ ID NO: 7712 - protein, 6 aa, ARTIFICIAL SEQUENCE
  Synthetic Construct
AKISLK

SEQ ID NO: 7713 - protein, 6 aa, ARTIFICIAL SEQUENCE
  Synthetic Construct
AKISNK

SEQ ID NO: 7714 - protein, 6 aa, ARTIFICIAL SEQUENCE
  Synthetic Construct
AKISQK

SEQ ID NO: 7715 - protein, 6 aa, ARTIFICIAL SEQUENCE
  Synthetic Construct
AKISRK

SEQ ID NO: 7716 - protein, 6 aa, ARTIFICIAL SEQUENCE
  Synthetic Construct
AKISSK

SEQ ID NO: 7717 - protein, 6 aa, ARTIFICIAL SEQUENCE
  Synthetic Construct
AKISTK

SEQ ID NO: 7718 - protein, 6 aa, ARTIFICIAL SEQUENCE
  Synthetic Construct
AKISYK

SEQ ID NO: 7719 - protein, 6 aa, ARTIFICIAL SEQUENCE
  Synthetic Construct
AKITAK

SEQ ID NO: 7720 - protein, 6 aa, ARTIFICIAL SEQUENCE
  Synthetic Construct
AKITDK

SEQ ID NO: 7721 - protein, 6 aa, ARTIFICIAL SEQUENCE
  Synthetic Construct
AKITEK

SEQ ID NO: 7722 - protein, 6 aa, ARTIFICIAL SEQUENCE
  Synthetic Construct
AKITFK

SEQ ID NO: 7723 - protein, 6 aa, ARTIFICIAL SEQUENCE
  Synthetic Construct
AKITGK

SEQ ID NO: 7724 - protein, 6 aa, ARTIFICIAL SEQUENCE
  Synthetic Construct
AKITHK

SEQ ID NO: 7725 - protein, 6 aa, ARTIFICIAL SEQUENCE
  Synthetic Construct
AKITIK

SEQ ID NO: 7726 - protein, 6 aa, ARTIFICIAL SEQUENCE
  Synthetic Construct
AKITLK

SEQ ID NO: 7727 - protein, 6 aa, ARTIFICIAL SEQUENCE
  Synthetic Construct
AKITNK

SEQ ID NO: 7728 - protein, 6 aa, ARTIFICIAL SEQUENCE
  Synthetic Construct
AKITQK

SEQ ID NO: 7729 - protein, 6 aa, ARTIFICIAL SEQUENCE
  Synthetic Construct
AKITRK

SEQ ID NO: 7730 - protein, 6 aa, ARTIFICIAL SEQUENCE
  Synthetic Construct
AKITSK

SEQ ID NO: 7731 - protein, 6 aa, ARTIFICIAL SEQUENCE
  Synthetic Construct
AKITTK

SEQ ID NO: 7732 - protein, 6 aa, ARTIFICIAL SEQUENCE
  Synthetic Construct
AKITYK

SEQ ID NO: 7733 - protein, 6 aa, ARTIFICIAL SEQUENCE
  Synthetic Construct
AKIYAK

SEQ ID NO: 7734 - protein, 6 aa, ARTIFICIAL SEQUENCE
  Synthetic Construct
AKIYDK

SEQ ID NO: 7735 - protein, 6 aa, ARTIFICIAL SEQUENCE
  Synthetic Construct
AKIYEK

SEQ ID NO: 7736 - protein, 6 aa, ARTIFICIAL SEQUENCE
  Synthetic Construct
AKIYFK

SEQ ID NO: 7737 - protein, 6 aa, ARTIFICIAL SEQUENCE
  Synthetic Construct
AKIYGK

SEQ ID NO: 7738 - protein, 6 aa, ARTIFICIAL SEQUENCE
  Synthetic Construct
AKIYHK

SEQ ID NO: 7739 - protein, 6 aa, ARTIFICIAL SEQUENCE
  Synthetic Construct
AKIYIK

SEQ ID NO: 7740 - protein, 6 aa, ARTIFICIAL SEQUENCE
  Synthetic Construct
AKIYLK

SEQ ID NO: 7741 - protein, 6 aa, ARTIFICIAL SEQUENCE
  Synthetic Construct
AKIYNK

SEQ ID NO: 7742 - protein, 6 aa, ARTIFICIAL SEQUENCE
  Synthetic Construct
AKIYQK

SEQ ID NO: 7743 - protein, 6 aa, ARTIFICIAL SEQUENCE
  Synthetic Construct
AKIYRK

SEQ ID NO: 7744 - protein, 6 aa, ARTIFICIAL SEQUENCE
  Synthetic Construct
AKIYSK

SEQ ID NO: 7745 - protein, 6 aa, ARTIFICIAL SEQUENCE
  Synthetic Construct
AKIYTK

SEQ ID NO: 7746 - protein, 6 aa, ARTIFICIAL SEQUENCE
  Synthetic Construct
AKIYYK

SEQ ID NO: 7747 - protein, 6 aa, ARTIFICIAL SEQUENCE
  Synthetic Construct
AKLAAK

SEQ ID NO: 7748 - protein, 6 aa, ARTIFICIAL SEQUENCE
  Synthetic Construct
AKLADK

SEQ ID NO: 7749 - protein, 6 aa, ARTIFICIAL SEQUENCE
  Synthetic Construct
AKLAEK

SEQ ID NO: 7750 - protein, 6 aa, ARTIFICIAL SEQUENCE
  Synthetic Construct
AKLAFK

SEQ ID NO: 7751 - protein, 6 aa, ARTIFICIAL SEQUENCE
  Synthetic Construct
AKLAGK

SEQ ID NO: 7752 - protein, 6 aa, ARTIFICIAL SEQUENCE
  Synthetic Construct
AKLAHK

SEQ ID NO: 7753 - protein, 6 aa, ARTIFICIAL SEQUENCE
  Synthetic Construct
AKLAIK

SEQ ID NO: 7754 - protein, 6 aa, ARTIFICIAL SEQUENCE
  Synthetic Construct
AKLALK

SEQ ID NO: 7755 - protein, 6 aa, ARTIFICIAL SEQUENCE
  Synthetic Construct
AKLANK

SEQ ID NO: 7756 - protein, 6 aa, ARTIFICIAL SEQUENCE
  Synthetic Construct
AKLAQK

SEQ ID NO: 7757 - protein, 6 aa, ARTIFICIAL SEQUENCE
  Synthetic Construct
AKLARK

SEQ ID NO: 7758 - protein, 6 aa, ARTIFICIAL SEQUENCE
  Synthetic Construct
AKLASK

SEQ ID NO: 7759 - protein, 6 aa, ARTIFICIAL SEQUENCE
  Synthetic Construct
AKLATK

SEQ ID NO: 7760 - protein, 6 aa, ARTIFICIAL SEQUENCE
  Synthetic Construct
AKLAYK

SEQ ID NO: 7761 - protein, 6 aa, ARTIFICIAL SEQUENCE
  Synthetic Construct
AKLDAK

SEQ ID NO: 7762 - protein, 6 aa, ARTIFICIAL SEQUENCE
  Synthetic Construct
AKLDDK

SEQ ID NO: 7763 - protein, 6 aa, ARTIFICIAL SEQUENCE
  Synthetic Construct
AKLDEK

SEQ ID NO: 7764 - protein, 6 aa, ARTIFICIAL SEQUENCE
  Synthetic Construct
AKLDFK

SEQ ID NO: 7765 - protein, 6 aa, ARTIFICIAL SEQUENCE
  Synthetic Construct
AKLDGK

SEQ ID NO: 7766 - protein, 6 aa, ARTIFICIAL SEQUENCE
  Synthetic Construct
AKLDHK

SEQ ID NO: 7767 - protein, 6 aa, ARTIFICIAL SEQUENCE
  Synthetic Construct
AKLDIK

SEQ ID NO: 7768 - protein, 6 aa, ARTIFICIAL SEQUENCE
  Synthetic Construct
AKLDLK

SEQ ID NO: 7769 - protein, 6 aa, ARTIFICIAL SEQUENCE
  Synthetic Construct
AKLDNK

SEQ ID NO: 7770 - protein, 6 aa, ARTIFICIAL SEQUENCE
  Synthetic Construct
AKLDQK

SEQ ID NO: 7771 - protein, 6 aa, ARTIFICIAL SEQUENCE
  Synthetic Construct
AKLDRK

SEQ ID NO: 7772 - protein, 6 aa, ARTIFICIAL SEQUENCE
  Synthetic Construct
AKLDSK

SEQ ID NO: 7773 - protein, 6 aa, ARTIFICIAL SEQUENCE
  Synthetic Construct
AKLDTK

SEQ ID NO: 7774 - protein, 6 aa, ARTIFICIAL SEQUENCE
  Synthetic Construct
AKLDYK

SEQ ID NO: 7775 - protein, 6 aa, ARTIFICIAL SEQUENCE
  Synthetic Construct
AKLEAK

SEQ ID NO: 7776 - protein, 6 aa, ARTIFICIAL SEQUENCE
  Synthetic Construct
AKLEDK

SEQ ID NO: 7777 - protein, 6 aa, ARTIFICIAL SEQUENCE
  Synthetic Construct
AKLEEK

SEQ ID NO: 7778 - protein, 6 aa, ARTIFICIAL SEQUENCE
  Synthetic Construct
AKLEFK

SEQ ID NO: 7779 - protein, 6 aa, ARTIFICIAL SEQUENCE
  Synthetic Construct
AKLEGK

SEQ ID NO: 7780 - protein, 6 aa, ARTIFICIAL SEQUENCE
  Synthetic Construct
AKLEHK

SEQ ID NO: 7781 - protein, 6 aa, ARTIFICIAL SEQUENCE
  Synthetic Construct
AKLEIK

SEQ ID NO: 7782 - protein, 6 aa, ARTIFICIAL SEQUENCE
  Synthetic Construct
AKLELK

SEQ ID NO: 7783 - protein, 6 aa, ARTIFICIAL SEQUENCE
  Synthetic Construct
AKLENK

SEQ ID NO: 7784 - protein, 6 aa, ARTIFICIAL SEQUENCE
  Synthetic Construct
AKLEQK

SEQ ID NO: 7785 - protein, 6 aa, ARTIFICIAL SEQUENCE
  Synthetic Construct
AKLERK

SEQ ID NO: 7786 - protein, 6 aa, ARTIFICIAL SEQUENCE
  Synthetic Construct
AKLESK

SEQ ID NO: 7787 - protein, 6 aa, ARTIFICIAL SEQUENCE
  Synthetic Construct
AKLETK

SEQ ID NO: 7788 - protein, 6 aa, ARTIFICIAL SEQUENCE
  Synthetic Construct
AKLEYK

SEQ ID NO: 7789 - protein, 6 aa, ARTIFICIAL SEQUENCE
  Synthetic Construct
AKLFAK

SEQ ID NO: 7790 - protein, 6 aa, ARTIFICIAL SEQUENCE
  Synthetic Construct
AKLFDK

SEQ ID NO: 7791 - protein, 6 aa, ARTIFICIAL SEQUENCE
  Synthetic Construct
AKLFEK

SEQ ID NO: 7792 - protein, 6 aa, ARTIFICIAL SEQUENCE
  Synthetic Construct
AKLFFK

SEQ ID NO: 7793 - protein, 6 aa, ARTIFICIAL SEQUENCE
  Synthetic Construct
AKLFGK

SEQ ID NO: 7794 - protein, 6 aa, ARTIFICIAL SEQUENCE
  Synthetic Construct
AKLFHK

SEQ ID NO: 7795 - protein, 6 aa, ARTIFICIAL SEQUENCE
  Synthetic Construct
AKLFIK

SEQ ID NO: 7796 - protein, 6 aa, ARTIFICIAL SEQUENCE
  Synthetic Construct
AKLFLK

SEQ ID NO: 7797 - protein, 6 aa, ARTIFICIAL SEQUENCE
  Synthetic Construct
AKLFNK

SEQ ID NO: 7798 - protein, 6 aa, ARTIFICIAL SEQUENCE
  Synthetic Construct
AKLFQK

SEQ ID NO: 7799 - protein, 6 aa, ARTIFICIAL SEQUENCE
  Synthetic Construct
AKLFRK

SEQ ID NO: 7800 - protein, 6 aa, ARTIFICIAL SEQUENCE
  Synthetic Construct
AKLFSK

SEQ ID NO: 7801 - protein, 6 aa, ARTIFICIAL SEQUENCE
  Synthetic Construct
AKLFTK

SEQ ID NO: 7802 - protein, 6 aa, ARTIFICIAL SEQUENCE
  Synthetic Construct
AKLFYK

SEQ ID NO: 7803 - protein, 6 aa, ARTIFICIAL SEQUENCE
  Synthetic Construct
AKLGAK

SEQ ID NO: 7804 - protein, 6 aa, ARTIFICIAL SEQUENCE
  Synthetic Construct
AKLGDK

SEQ ID NO: 7805 - protein, 6 aa, ARTIFICIAL SEQUENCE
  Synthetic Construct
AKLGEK

SEQ ID NO: 7806 - protein, 6 aa, ARTIFICIAL SEQUENCE
  Synthetic Construct
AKLGFK

SEQ ID NO: 7807 - protein, 6 aa, ARTIFICIAL SEQUENCE
  Synthetic Construct
AKLGGK

SEQ ID NO: 7808 - protein, 6 aa, ARTIFICIAL SEQUENCE
  Synthetic Construct
AKLGHK

SEQ ID NO: 7809 - protein, 6 aa, ARTIFICIAL SEQUENCE
  Synthetic Construct
AKLGIK

SEQ ID NO: 7810 - protein, 6 aa, ARTIFICIAL SEQUENCE
  Synthetic Construct
AKLGLK

SEQ ID NO: 7811 - protein, 6 aa, ARTIFICIAL SEQUENCE
  Synthetic Construct
AKLGNK

SEQ ID NO: 7812 - protein, 6 aa, ARTIFICIAL SEQUENCE
  Synthetic Construct
AKLGQK

SEQ ID NO: 7813 - protein, 6 aa, ARTIFICIAL SEQUENCE
  Synthetic Construct
AKLGRK

SEQ ID NO: 7814 - protein, 6 aa, ARTIFICIAL SEQUENCE
  Synthetic Construct
AKLGSK

SEQ ID NO: 7815 - protein, 6 aa, ARTIFICIAL SEQUENCE
  Synthetic Construct
AKLGTK

SEQ ID NO: 7816 - protein, 6 aa, ARTIFICIAL SEQUENCE
  Synthetic Construct
AKLGYK

SEQ ID NO: 7817 - protein, 6 aa, ARTIFICIAL SEQUENCE
  Synthetic Construct
AKLHAK

SEQ ID NO: 7818 - protein, 6 aa, ARTIFICIAL SEQUENCE
  Synthetic Construct
AKLHDK

SEQ ID NO: 7819 - protein, 6 aa, ARTIFICIAL SEQUENCE
  Synthetic Construct
AKLHEK

SEQ ID NO: 7820 - protein, 6 aa, ARTIFICIAL SEQUENCE
  Synthetic Construct
AKLHFK

SEQ ID NO: 7821 - protein, 6 aa, ARTIFICIAL SEQUENCE
  Synthetic Construct
AKLHGK

SEQ ID NO: 7822 - protein, 6 aa, ARTIFICIAL SEQUENCE
  Synthetic Construct
AKLHHK

SEQ ID NO: 7823 - protein, 6 aa, ARTIFICIAL SEQUENCE
  Synthetic Construct
AKLHIK

SEQ ID NO: 7824 - protein, 6 aa, ARTIFICIAL SEQUENCE
  Synthetic Construct
AKLHLK

SEQ ID NO: 7825 - protein, 6 aa, ARTIFICIAL SEQUENCE
  Synthetic Construct
AKLHNK

SEQ ID NO: 7826 - protein, 6 aa, ARTIFICIAL SEQUENCE
  Synthetic Construct
AKLHQK

SEQ ID NO: 7827 - protein, 6 aa, ARTIFICIAL SEQUENCE
  Synthetic Construct
AKLHRK

SEQ ID NO: 7828 - protein, 6 aa, ARTIFICIAL SEQUENCE
  Synthetic Construct
AKLHSK

SEQ ID NO: 7829 - protein, 6 aa, ARTIFICIAL SEQUENCE
  Synthetic Construct
AKLHTK

SEQ ID NO: 7830 - protein, 6 aa, ARTIFICIAL SEQUENCE
  Synthetic Construct
AKLHYK

SEQ ID NO: 7831 - protein, 6 aa, ARTIFICIAL SEQUENCE
  Synthetic Construct
AKLIAK

SEQ ID NO: 7832 - protein, 6 aa, ARTIFICIAL SEQUENCE
  Synthetic Construct
AKLIDK

SEQ ID NO: 7833 - protein, 6 aa, ARTIFICIAL SEQUENCE
  Synthetic Construct
AKLIEK

SEQ ID NO: 7834 - protein, 6 aa, ARTIFICIAL SEQUENCE
  Synthetic Construct
AKLIFK

SEQ ID NO: 7835 - protein, 6 aa, ARTIFICIAL SEQUENCE
  Synthetic Construct
AKLIGK

SEQ ID NO: 7836 - protein, 6 aa, ARTIFICIAL SEQUENCE
  Synthetic Construct
AKLIHK

SEQ ID NO: 7837 - protein, 6 aa, ARTIFICIAL SEQUENCE
  Synthetic Construct
AKLIIK

SEQ ID NO: 7838 - protein, 6 aa, ARTIFICIAL SEQUENCE
  Synthetic Construct
AKLILK

SEQ ID NO: 7839 - protein, 6 aa, ARTIFICIAL SEQUENCE
  Synthetic Construct
AKLINK

SEQ ID NO: 7840 - protein, 6 aa, ARTIFICIAL SEQUENCE
  Synthetic Construct
AKLIQK

SEQ ID NO: 7841 - protein, 6 aa, ARTIFICIAL SEQUENCE
  Synthetic Construct
AKLIRK

SEQ ID NO: 7842 - protein, 6 aa, ARTIFICIAL SEQUENCE
  Synthetic Construct
AKLISK

SEQ ID NO: 7843 - protein, 6 aa, ARTIFICIAL SEQUENCE
  Synthetic Construct
AKLITK

SEQ ID NO: 7844 - protein, 6 aa, ARTIFICIAL SEQUENCE
  Synthetic Construct
AKLIYK

SEQ ID NO: 7845 - protein, 6 aa, ARTIFICIAL SEQUENCE
  Synthetic Construct
AKLLAK

SEQ ID NO: 7846 - protein, 6 aa, ARTIFICIAL SEQUENCE
  Synthetic Construct
AKLLDK

SEQ ID NO: 7847 - protein, 6 aa, ARTIFICIAL SEQUENCE
  Synthetic Construct
AKLLEK

SEQ ID NO: 7848 - protein, 6 aa, ARTIFICIAL SEQUENCE
  Synthetic Construct
AKLLFK

SEQ ID NO: 7849 - protein, 6 aa, ARTIFICIAL SEQUENCE
  Synthetic Construct
AKLLGK

SEQ ID NO: 7850 - protein, 6 aa, ARTIFICIAL SEQUENCE
  Synthetic Construct
AKLLHK

SEQ ID NO: 7851 - protein, 6 aa, ARTIFICIAL SEQUENCE
  Synthetic Construct
AKLLIK

SEQ ID NO: 7852 - protein, 6 aa, ARTIFICIAL SEQUENCE
  Synthetic Construct
AKLLLK

SEQ ID NO: 7853 - protein, 6 aa, ARTIFICIAL SEQUENCE
  Synthetic Construct
AKLLNK

SEQ ID NO: 7854 - protein, 6 aa, ARTIFICIAL SEQUENCE
  Synthetic Construct
AKLLQK

SEQ ID NO: 7855 - protein, 6 aa, ARTIFICIAL SEQUENCE
  Synthetic Construct
AKLLRK

SEQ ID NO: 7856 - protein, 6 aa, ARTIFICIAL SEQUENCE
  Synthetic Construct
AKLLSK

SEQ ID NO: 7857 - protein, 6 aa, ARTIFICIAL SEQUENCE
  Synthetic Construct
AKLLTK

SEQ ID NO: 7858 - protein, 6 aa, ARTIFICIAL SEQUENCE
  Synthetic Construct
AKLLYK

SEQ ID NO: 7859 - protein, 6 aa, ARTIFICIAL SEQUENCE
  Synthetic Construct
AKLNAK

SEQ ID NO: 7860 - protein, 6 aa, ARTIFICIAL SEQUENCE
  Synthetic Construct
AKLNDK

SEQ ID NO: 7861 - protein, 6 aa, ARTIFICIAL SEQUENCE
  Synthetic Construct
AKLNEK

SEQ ID NO: 7862 - protein, 6 aa, ARTIFICIAL SEQUENCE
  Synthetic Construct
AKLNFK

SEQ ID NO: 7863 - protein, 6 aa, ARTIFICIAL SEQUENCE
  Synthetic Construct
AKLNGK

SEQ ID NO: 7864 - protein, 6 aa, ARTIFICIAL SEQUENCE
  Synthetic Construct
AKLNHK

SEQ ID NO: 7865 - protein, 6 aa, ARTIFICIAL SEQUENCE
  Synthetic Construct
AKLNIK

SEQ ID NO: 7866 - protein, 6 aa, ARTIFICIAL SEQUENCE
  Synthetic Construct
AKLNLK

SEQ ID NO: 7867 - protein, 6 aa, ARTIFICIAL SEQUENCE
  Synthetic Construct
AKLNNK

SEQ ID NO: 7868 - protein, 6 aa, ARTIFICIAL SEQUENCE
  Synthetic Construct
AKLNQK

SEQ ID NO: 7869 - protein, 6 aa, ARTIFICIAL SEQUENCE
  Synthetic Construct
AKLNRK

SEQ ID NO: 7870 - protein, 6 aa, ARTIFICIAL SEQUENCE
  Synthetic Construct
AKLNSK

SEQ ID NO: 7871 - protein, 6 aa, ARTIFICIAL SEQUENCE
  Synthetic Construct
AKLNTK

SEQ ID NO: 7872 - protein, 6 aa, ARTIFICIAL SEQUENCE
  Synthetic Construct
AKLNYK

SEQ ID NO: 7873 - protein, 6 aa, ARTIFICIAL SEQUENCE
  Synthetic Construct
AKLQAK

SEQ ID NO: 7874 - protein, 6 aa, ARTIFICIAL SEQUENCE
  Synthetic Construct
AKLQDK

SEQ ID NO: 7875 - protein, 6 aa, ARTIFICIAL SEQUENCE
  Synthetic Construct
AKLQEK

SEQ ID NO: 7876 - protein, 6 aa, ARTIFICIAL SEQUENCE
  Synthetic Construct
AKLQFK

SEQ ID NO: 7877 - protein, 6 aa, ARTIFICIAL SEQUENCE
  Synthetic Construct
AKLQGK

SEQ ID NO: 7878 - protein, 6 aa, ARTIFICIAL SEQUENCE
  Synthetic Construct
AKLQHK

SEQ ID NO: 7879 - protein, 6 aa, ARTIFICIAL SEQUENCE
  Synthetic Construct
AKLQIK

SEQ ID NO: 7880 - protein, 6 aa, ARTIFICIAL SEQUENCE
  Synthetic Construct
AKLQLK

SEQ ID NO: 7881 - protein, 6 aa, ARTIFICIAL SEQUENCE
  Synthetic Construct
AKLQNK

SEQ ID NO: 7882 - protein, 6 aa, ARTIFICIAL SEQUENCE
  Synthetic Construct
AKLQQK

SEQ ID NO: 7883 - protein, 6 aa, ARTIFICIAL SEQUENCE
  Synthetic Construct
AKLQRK

SEQ ID NO: 7884 - protein, 6 aa, ARTIFICIAL SEQUENCE
  Synthetic Construct
AKLQSK

SEQ ID NO: 7885 - protein, 6 aa, ARTIFICIAL SEQUENCE
  Synthetic Construct
AKLQTK

SEQ ID NO: 7886 - protein, 6 aa, ARTIFICIAL SEQUENCE
  Synthetic Construct
AKLQYK

SEQ ID NO: 7887 - protein, 6 aa, ARTIFICIAL SEQUENCE
  Synthetic Construct
AKLRAK

SEQ ID NO: 7888 - protein, 6 aa, ARTIFICIAL SEQUENCE
  Synthetic Construct
AKLRDK

SEQ ID NO: 7889 - protein, 6 aa, ARTIFICIAL SEQUENCE
  Synthetic Construct
AKLREK

SEQ ID NO: 7890 - protein, 6 aa, ARTIFICIAL SEQUENCE
  Synthetic Construct
AKLRFK

SEQ ID NO: 7891 - protein, 6 aa, ARTIFICIAL SEQUENCE
  Synthetic Construct
AKLRGK

SEQ ID NO: 7892 - protein, 6 aa, ARTIFICIAL SEQUENCE
  Synthetic Construct
AKLRHK

SEQ ID NO: 7893 - protein, 6 aa, ARTIFICIAL SEQUENCE
  Synthetic Construct
AKLRIK

SEQ ID NO: 7894 - protein, 6 aa, ARTIFICIAL SEQUENCE
  Synthetic Construct
AKLRLK

SEQ ID NO: 7895 - protein, 6 aa, ARTIFICIAL SEQUENCE
  Synthetic Construct
AKLRNK

SEQ ID NO: 7896 - protein, 6 aa, ARTIFICIAL SEQUENCE
  Synthetic Construct
AKLRQK

SEQ ID NO: 7897 - protein, 6 aa, ARTIFICIAL SEQUENCE
  Synthetic Construct
AKLRRK

SEQ ID NO: 7898 - protein, 6 aa, ARTIFICIAL SEQUENCE
  Synthetic Construct
AKLRSK

SEQ ID NO: 7899 - protein, 6 aa, ARTIFICIAL SEQUENCE
  Synthetic Construct
AKLRTK

SEQ ID NO: 7900 - protein, 6 aa, ARTIFICIAL SEQUENCE
  Synthetic Construct
AKLRYK

SEQ ID NO: 7901 - protein, 6 aa, ARTIFICIAL SEQUENCE
  Synthetic Construct
AKLSAK

SEQ ID NO: 7902 - protein, 6 aa, ARTIFICIAL SEQUENCE
  Synthetic Construct
AKLSDK

SEQ ID NO: 7903 - protein, 6 aa, ARTIFICIAL SEQUENCE
  Synthetic Construct
AKLSEK

SEQ ID NO: 7904 - protein, 6 aa, ARTIFICIAL SEQUENCE
  Synthetic Construct
AKLSFK

SEQ ID NO: 7905 - protein, 6 aa, ARTIFICIAL SEQUENCE
  Synthetic Construct
AKLSGK

SEQ ID NO: 7906 - protein, 6 aa, ARTIFICIAL SEQUENCE
  Synthetic Construct
AKLSHK

SEQ ID NO: 7907 - protein, 6 aa, ARTIFICIAL SEQUENCE
  Synthetic Construct
AKLSIK

SEQ ID NO: 7908 - protein, 6 aa, ARTIFICIAL SEQUENCE
  Synthetic Construct
AKLSLK

SEQ ID NO: 7909 - protein, 6 aa, ARTIFICIAL SEQUENCE
  Synthetic Construct
AKLSNK

SEQ ID NO: 7910 - protein, 6 aa, ARTIFICIAL SEQUENCE
  Synthetic Construct
AKLSQK

SEQ ID NO: 7911 - protein, 6 aa, ARTIFICIAL SEQUENCE
  Synthetic Construct
AKLSRK

SEQ ID NO: 7912 - protein, 6 aa, ARTIFICIAL SEQUENCE
  Synthetic Construct
AKLSSK

SEQ ID NO: 7913 - protein, 6 aa, ARTIFICIAL SEQUENCE
  Synthetic Construct
AKLSTK

SEQ ID NO: 7914 - protein, 6 aa, ARTIFICIAL SEQUENCE
  Synthetic Construct
AKLSYK

SEQ ID NO: 7915 - protein, 6 aa, ARTIFICIAL SEQUENCE
  Synthetic Construct
AKLTAK

SEQ ID NO: 7916 - protein, 6 aa, ARTIFICIAL SEQUENCE
  Synthetic Construct
AKLTDK

SEQ ID NO: 7917 - protein, 6 aa, ARTIFICIAL SEQUENCE
  Synthetic Construct
AKLTEK

SEQ ID NO: 7918 - protein, 6 aa, ARTIFICIAL SEQUENCE
  Synthetic Construct
AKLTFK

SEQ ID NO: 7919 - protein, 6 aa, ARTIFICIAL SEQUENCE
  Synthetic Construct
AKLTGK

SEQ ID NO: 7920 - protein, 6 aa, ARTIFICIAL SEQUENCE
  Synthetic Construct
AKLTHK

SEQ ID NO: 7921 - protein, 6 aa, ARTIFICIAL SEQUENCE
  Synthetic Construct
AKLTIK

SEQ ID NO: 7922 - protein, 6 aa, ARTIFICIAL SEQUENCE
  Synthetic Construct
AKLTLK

SEQ ID NO: 7923 - protein, 6 aa, ARTIFICIAL SEQUENCE
  Synthetic Construct
AKLTNK

SEQ ID NO: 7924 - protein, 6 aa, ARTIFICIAL SEQUENCE
  Synthetic Construct
AKLTQK

SEQ ID NO: 7925 - protein, 6 aa, ARTIFICIAL SEQUENCE
  Synthetic Construct
AKLTRK

SEQ ID NO: 7926 - protein, 6 aa, ARTIFICIAL SEQUENCE
  Synthetic Construct
AKLTSK

SEQ ID NO: 7927 - protein, 6 aa, ARTIFICIAL SEQUENCE
  Synthetic Construct
AKLTTK

SEQ ID NO: 7928 - protein, 6 aa, ARTIFICIAL SEQUENCE
  Synthetic Construct
AKLTYK

SEQ ID NO: 7929 - protein, 6 aa, ARTIFICIAL SEQUENCE
  Synthetic Construct
AKLYAK

SEQ ID NO: 7930 - protein, 6 aa, ARTIFICIAL SEQUENCE
  Synthetic Construct
AKLYDK

SEQ ID NO: 7931 - protein, 6 aa, ARTIFICIAL SEQUENCE
  Synthetic Construct
AKLYEK

SEQ ID NO: 7932 - protein, 6 aa, ARTIFICIAL SEQUENCE
  Synthetic Construct
AKLYFK

SEQ ID NO: 7933 - protein, 6 aa, ARTIFICIAL SEQUENCE
  Synthetic Construct
AKLYGK

SEQ ID NO: 7934 - protein, 6 aa, ARTIFICIAL SEQUENCE
  Synthetic Construct
AKLYHK

SEQ ID NO: 7935 - protein, 6 aa, ARTIFICIAL SEQUENCE
  Synthetic Construct
AKLYIK

SEQ ID NO: 7936 - protein, 6 aa, ARTIFICIAL SEQUENCE
  Synthetic Construct
AKLYLK

SEQ ID NO: 7937 - protein, 6 aa, ARTIFICIAL SEQUENCE
  Synthetic Construct
AKLYNK

SEQ ID NO: 7938 - protein, 6 aa, ARTIFICIAL SEQUENCE
  Synthetic Construct
AKLYQK

SEQ ID NO: 7939 - protein, 6 aa, ARTIFICIAL SEQUENCE
  Synthetic Construct
AKLYRK

SEQ ID NO: 7940 - protein, 6 aa, ARTIFICIAL SEQUENCE
  Synthetic Construct
AKLYSK

SEQ ID NO: 7941 - protein, 6 aa, ARTIFICIAL SEQUENCE
  Synthetic Construct
AKLYTK

SEQ ID NO: 7942 - protein, 6 aa, ARTIFICIAL SEQUENCE
  Synthetic Construct
AKLYYK

SEQ ID NO: 7943 - protein, 6 aa, ARTIFICIAL SEQUENCE
  Synthetic Construct
AKNAAK

SEQ ID NO: 7944 - protein, 6 aa, ARTIFICIAL SEQUENCE
  Synthetic Construct
AKNADK

SEQ ID NO: 7945 - protein, 6 aa, ARTIFICIAL SEQUENCE
  Synthetic Construct
AKNAEK

SEQ ID NO: 7946 - protein, 6 aa, ARTIFICIAL SEQUENCE
  Synthetic Construct
AKNAFK

SEQ ID NO: 7947 - protein, 6 aa, ARTIFICIAL SEQUENCE
  Synthetic Construct
AKNAGK

SEQ ID NO: 7948 - protein, 6 aa, ARTIFICIAL SEQUENCE
  Synthetic Construct
AKNAHK

SEQ ID NO: 7949 - protein, 6 aa, ARTIFICIAL SEQUENCE
  Synthetic Construct
AKNAIK

SEQ ID NO: 7950 - protein, 6 aa, ARTIFICIAL SEQUENCE
  Synthetic Construct
AKNALK

SEQ ID NO: 7951 - protein, 6 aa, ARTIFICIAL SEQUENCE
  Synthetic Construct
AKNANK

SEQ ID NO: 7952 - protein, 6 aa, ARTIFICIAL SEQUENCE
  Synthetic Construct
AKNAQK

SEQ ID NO: 7953 - protein, 6 aa, ARTIFICIAL SEQUENCE
  Synthetic Construct
AKNARK

SEQ ID NO: 7954 - protein, 6 aa, ARTIFICIAL SEQUENCE
  Synthetic Construct
AKNASK

SEQ ID NO: 7955 - protein, 6 aa, ARTIFICIAL SEQUENCE
  Synthetic Construct
AKNATK

SEQ ID NO: 7956 - protein, 6 aa, ARTIFICIAL SEQUENCE
  Synthetic Construct
AKNAYK

SEQ ID NO: 7957 - protein, 6 aa, ARTIFICIAL SEQUENCE
  Synthetic Construct
AKNDAK

SEQ ID NO: 7958 - protein, 6 aa, ARTIFICIAL SEQUENCE
  Synthetic Construct
AKNDDK

SEQ ID NO: 7959 - protein, 6 aa, ARTIFICIAL SEQUENCE
  Synthetic Construct
AKNDEK

SEQ ID NO: 7960 - protein, 6 aa, ARTIFICIAL SEQUENCE
  Synthetic Construct
AKNDFK

SEQ ID NO: 7961 - protein, 6 aa, ARTIFICIAL SEQUENCE
  Synthetic Construct
AKNDGK

SEQ ID NO: 7962 - protein, 6 aa, ARTIFICIAL SEQUENCE
  Synthetic Construct
AKNDHK

SEQ ID NO: 7963 - protein, 6 aa, ARTIFICIAL SEQUENCE
  Synthetic Construct
AKNDIK

SEQ ID NO: 7964 - protein, 6 aa, ARTIFICIAL SEQUENCE
  Synthetic Construct
AKNDLK

SEQ ID NO: 7965 - protein, 6 aa, ARTIFICIAL SEQUENCE
  Synthetic Construct
AKNDNK

SEQ ID NO: 7966 - protein, 6 aa, ARTIFICIAL SEQUENCE
  Synthetic Construct
AKNDQK

SEQ ID NO: 7967 - protein, 6 aa, ARTIFICIAL SEQUENCE
  Synthetic Construct
AKNDRK

SEQ ID NO: 7968 - protein, 6 aa, ARTIFICIAL SEQUENCE
  Synthetic Construct
AKNDSK

SEQ ID NO: 7969 - protein, 6 aa, ARTIFICIAL SEQUENCE
  Synthetic Construct
AKNDTK

SEQ ID NO: 7970 - protein, 6 aa, ARTIFICIAL SEQUENCE
  Synthetic Construct
AKNDYK

SEQ ID NO: 7971 - protein, 6 aa, ARTIFICIAL SEQUENCE
  Synthetic Construct
AKNEAK

SEQ ID NO: 7972 - protein, 6 aa, ARTIFICIAL SEQUENCE
  Synthetic Construct
AKNEDK

SEQ ID NO: 7973 - protein, 6 aa, ARTIFICIAL SEQUENCE
  Synthetic Construct
AKNEEK

SEQ ID NO: 7974 - protein, 6 aa, ARTIFICIAL SEQUENCE
  Synthetic Construct
AKNEFK

SEQ ID NO: 7975 - protein, 6 aa, ARTIFICIAL SEQUENCE
  Synthetic Construct
AKNEGK

SEQ ID NO: 7976 - protein, 6 aa, ARTIFICIAL SEQUENCE
  Synthetic Construct
AKNEHK

SEQ ID NO: 7977 - protein, 6 aa, ARTIFICIAL SEQUENCE
  Synthetic Construct
AKNEIK

SEQ ID NO: 7978 - protein, 6 aa, ARTIFICIAL SEQUENCE
  Synthetic Construct
AKNELK

SEQ ID NO: 7979 - protein, 6 aa, ARTIFICIAL SEQUENCE
  Synthetic Construct
AKNENK

SEQ ID NO: 7980 - protein, 6 aa, ARTIFICIAL SEQUENCE
  Synthetic Construct
AKNEQK

SEQ ID NO: 7981 - protein, 6 aa, ARTIFICIAL SEQUENCE
  Synthetic Construct
AKNERK

SEQ ID NO: 7982 - protein, 6 aa, ARTIFICIAL SEQUENCE
  Synthetic Construct
AKNESK

SEQ ID NO: 7983 - protein, 6 aa, ARTIFICIAL SEQUENCE
  Synthetic Construct
AKNETK

SEQ ID NO: 7984 - protein, 6 aa, ARTIFICIAL SEQUENCE
  Synthetic Construct
AKNEYK

SEQ ID NO: 7985 - protein, 6 aa, ARTIFICIAL SEQUENCE
  Synthetic Construct
AKNFAK

SEQ ID NO: 7986 - protein, 6 aa, ARTIFICIAL SEQUENCE
  Synthetic Construct
AKNFDK

SEQ ID NO: 7987 - protein, 6 aa, ARTIFICIAL SEQUENCE
  Synthetic Construct
AKNFEK

SEQ ID NO: 7988 - protein, 6 aa, ARTIFICIAL SEQUENCE
  Synthetic Construct
AKNFFK

SEQ ID NO: 7989 - protein, 6 aa, ARTIFICIAL SEQUENCE
  Synthetic Construct
AKNFGK

SEQ ID NO: 7990 - protein, 6 aa, ARTIFICIAL SEQUENCE
  Synthetic Construct
AKNFHK

SEQ ID NO: 7991 - protein, 6 aa, ARTIFICIAL SEQUENCE
  Synthetic Construct
AKNFIK

SEQ ID NO: 7992 - protein, 6 aa, ARTIFICIAL SEQUENCE
  Synthetic Construct
AKNFLK

SEQ ID NO: 7993 - protein, 6 aa, ARTIFICIAL SEQUENCE
  Synthetic Construct
AKNFNK

SEQ ID NO: 7994 - protein, 6 aa, ARTIFICIAL SEQUENCE
  Synthetic Construct
AKNFQK

SEQ ID NO: 7995 - protein, 6 aa, ARTIFICIAL SEQUENCE
  Synthetic Construct
AKNFRK

SEQ ID NO: 7996 - protein, 6 aa, ARTIFICIAL SEQUENCE
  Synthetic Construct
AKNFSK

SEQ ID NO: 7997 - protein, 6 aa, ARTIFICIAL SEQUENCE
  Synthetic Construct
AKNFTK

SEQ ID NO: 7998 - protein, 6 aa, ARTIFICIAL SEQUENCE
  Synthetic Construct
AKNFYK

SEQ ID NO: 7999 - protein, 6 aa, ARTIFICIAL SEQUENCE
  Synthetic Construct
AKNGAK

SEQ ID NO: 8000 - protein, 6 aa, ARTIFICIAL SEQUENCE
  Synthetic Construct
AKNGDK

SEQ ID NO: 8001 - protein, 6 aa, ARTIFICIAL SEQUENCE
  Synthetic Construct
AKNGEK

SEQ ID NO: 8002 - protein, 6 aa, ARTIFICIAL SEQUENCE
  Synthetic Construct
AKNGFK

SEQ ID NO: 8003 - protein, 6 aa, ARTIFICIAL SEQUENCE
  Synthetic Construct
AKNGGK

SEQ ID NO: 8004 - protein, 6 aa, ARTIFICIAL SEQUENCE
  Synthetic Construct
AKNGHK

SEQ ID NO: 8005 - protein, 6 aa, ARTIFICIAL SEQUENCE
  Synthetic Construct
AKNGIK

SEQ ID NO: 8006 - protein, 6 aa, ARTIFICIAL SEQUENCE
  Synthetic Construct
AKNGLK

SEQ ID NO: 8007 - protein, 6 aa, ARTIFICIAL SEQUENCE
  Synthetic Construct
AKNGNK

SEQ ID NO: 8008 - protein, 6 aa, ARTIFICIAL SEQUENCE
  Synthetic Construct
AKNGQK

SEQ ID NO: 8009 - protein, 6 aa, ARTIFICIAL SEQUENCE
  Synthetic Construct
AKNGRK

SEQ ID NO: 8010 - protein, 6 aa, ARTIFICIAL SEQUENCE
  Synthetic Construct
AKNGSK

SEQ ID NO: 8011 - protein, 6 aa, ARTIFICIAL SEQUENCE
  Synthetic Construct
AKNGTK

SEQ ID NO: 8012 - protein, 6 aa, ARTIFICIAL SEQUENCE
  Synthetic Construct
AKNGYK

SEQ ID NO: 8013 - protein, 6 aa, ARTIFICIAL SEQUENCE
  Synthetic Construct
AKNHAK

SEQ ID NO: 8014 - protein, 6 aa, ARTIFICIAL SEQUENCE
  Synthetic Construct
AKNHDK

SEQ ID NO: 8015 - protein, 6 aa, ARTIFICIAL SEQUENCE
  Synthetic Construct
AKNHEK

SEQ ID NO: 8016 - protein, 6 aa, ARTIFICIAL SEQUENCE
  Synthetic Construct
AKNHFK

SEQ ID NO: 8017 - protein, 6 aa, ARTIFICIAL SEQUENCE
  Synthetic Construct
AKNHGK

SEQ ID NO: 8018 - protein, 6 aa, ARTIFICIAL SEQUENCE
  Synthetic Construct
AKNHHK

SEQ ID NO: 8019 - protein, 6 aa, ARTIFICIAL SEQUENCE
  Synthetic Construct
AKNHIK

SEQ ID NO: 8020 - protein, 6 aa, ARTIFICIAL SEQUENCE
  Synthetic Construct
AKNHLK

SEQ ID NO: 8021 - protein, 6 aa, ARTIFICIAL SEQUENCE
  Synthetic Construct
AKNHNK

SEQ ID NO: 8022 - protein, 6 aa, ARTIFICIAL SEQUENCE
  Synthetic Construct
AKNHQK

SEQ ID NO: 8023 - protein, 6 aa, ARTIFICIAL SEQUENCE
  Synthetic Construct
AKNHRK

SEQ ID NO: 8024 - protein, 6 aa, ARTIFICIAL SEQUENCE
  Synthetic Construct
AKNHSK

SEQ ID NO: 8025 - protein, 6 aa, ARTIFICIAL SEQUENCE
  Synthetic Construct
AKNHTK

SEQ ID NO: 8026 - protein, 6 aa, ARTIFICIAL SEQUENCE
  Synthetic Construct
AKNHYK

SEQ ID NO: 8027 - protein, 6 aa, ARTIFICIAL SEQUENCE
  Synthetic Construct
AKNIAK

SEQ ID NO: 8028 - protein, 6 aa, ARTIFICIAL SEQUENCE
  Synthetic Construct
AKNIDK

SEQ ID NO: 8029 - protein, 6 aa, ARTIFICIAL SEQUENCE
  Synthetic Construct
AKNIEK

SEQ ID NO: 8030 - protein, 6 aa, ARTIFICIAL SEQUENCE
  Synthetic Construct
AKNIFK

SEQ ID NO: 8031 - protein, 6 aa, ARTIFICIAL SEQUENCE
  Synthetic Construct
AKNIGK

SEQ ID NO: 8032 - protein, 6 aa, ARTIFICIAL SEQUENCE
  Synthetic Construct
AKNIHK

SEQ ID NO: 8033 - protein, 6 aa, ARTIFICIAL SEQUENCE
  Synthetic Construct
AKNIIK

SEQ ID NO: 8034 - protein, 6 aa, ARTIFICIAL SEQUENCE
  Synthetic Construct
AKNILK

SEQ ID NO: 8035 - protein, 6 aa, ARTIFICIAL SEQUENCE
  Synthetic Construct
AKNINK

SEQ ID NO: 8036 - protein, 6 aa, ARTIFICIAL SEQUENCE
  Synthetic Construct
AKNIQK

SEQ ID NO: 8037 - protein, 6 aa, ARTIFICIAL SEQUENCE
  Synthetic Construct
AKNIRK

SEQ ID NO: 8038 - protein, 6 aa, ARTIFICIAL SEQUENCE
  Synthetic Construct
AKNISK

SEQ ID NO: 8039 - protein, 6 aa, ARTIFICIAL SEQUENCE
  Synthetic Construct
AKNITK

SEQ ID NO: 8040 - protein, 6 aa, ARTIFICIAL SEQUENCE
  Synthetic Construct
AKNIYK

SEQ ID NO: 8041 - protein, 6 aa, ARTIFICIAL SEQUENCE
  Synthetic Construct
AKNLAK

SEQ ID NO: 8042 - protein, 6 aa, ARTIFICIAL SEQUENCE
  Synthetic Construct
AKNLDK

SEQ ID NO: 8043 - protein, 6 aa, ARTIFICIAL SEQUENCE
  Synthetic Construct
AKNLEK

SEQ ID NO: 8044 - protein, 6 aa, ARTIFICIAL SEQUENCE
  Synthetic Construct
AKNLFK

SEQ ID NO: 8045 - protein, 6 aa, ARTIFICIAL SEQUENCE
  Synthetic Construct
AKNLGK

SEQ ID NO: 8046 - protein, 6 aa, ARTIFICIAL SEQUENCE
  Synthetic Construct
AKNLHK

SEQ ID NO: 8047 - protein, 6 aa, ARTIFICIAL SEQUENCE
  Synthetic Construct
AKNLIK

SEQ ID NO: 8048 - protein, 6 aa, ARTIFICIAL SEQUENCE
  Synthetic Construct
AKNLLK

SEQ ID NO: 8049 - protein, 6 aa, ARTIFICIAL SEQUENCE
  Synthetic Construct
AKNLNK

SEQ ID NO: 8050 - protein, 6 aa, ARTIFICIAL SEQUENCE
  Synthetic Construct
AKNLQK

SEQ ID NO: 8051 - protein, 6 aa, ARTIFICIAL SEQUENCE
  Synthetic Construct
AKNLRK

SEQ ID NO: 8052 - protein, 6 aa, ARTIFICIAL SEQUENCE
  Synthetic Construct
AKNLSK

SEQ ID NO: 8053 - protein, 6 aa, ARTIFICIAL SEQUENCE
  Synthetic Construct
AKNLTK

SEQ ID NO: 8054 - protein, 6 aa, ARTIFICIAL SEQUENCE
  Synthetic Construct
AKNLYK

SEQ ID NO: 8055 - protein, 6 aa, ARTIFICIAL SEQUENCE
  Synthetic Construct
AKNNAK

SEQ ID NO: 8056 - protein, 6 aa, ARTIFICIAL SEQUENCE
  Synthetic Construct
AKNNDK

SEQ ID NO: 8057 - protein, 6 aa, ARTIFICIAL SEQUENCE
  Synthetic Construct
AKNNEK

SEQ ID NO: 8058 - protein, 6 aa, ARTIFICIAL SEQUENCE
  Synthetic Construct
AKNNFK

SEQ ID NO: 8059 - protein, 6 aa, ARTIFICIAL SEQUENCE
  Synthetic Construct
AKNNGK

SEQ ID NO: 8060 - protein, 6 aa, ARTIFICIAL SEQUENCE
  Synthetic Construct
AKNNHK

SEQ ID NO: 8061 - protein, 6 aa, ARTIFICIAL SEQUENCE
  Synthetic Construct
AKNNIK

SEQ ID NO: 8062 - protein, 6 aa, ARTIFICIAL SEQUENCE
  Synthetic Construct
AKNNLK

SEQ ID NO: 8063 - protein, 6 aa, ARTIFICIAL SEQUENCE
  Synthetic Construct
AKNNNK

SEQ ID NO: 8064 - protein, 6 aa, ARTIFICIAL SEQUENCE
  Synthetic Construct
AKNNQK

SEQ ID NO: 8065 - protein, 6 aa, ARTIFICIAL SEQUENCE
  Synthetic Construct
AKNNRK

SEQ ID NO: 8066 - protein, 6 aa, ARTIFICIAL SEQUENCE
  Synthetic Construct
AKNNSK

SEQ ID NO: 8067 - protein, 6 aa, ARTIFICIAL SEQUENCE
  Synthetic Construct
AKNNTK

SEQ ID NO: 8068 - protein, 6 aa, ARTIFICIAL SEQUENCE
  Synthetic Construct
AKNNYK

SEQ ID NO: 8069 - protein, 6 aa, ARTIFICIAL SEQUENCE
  Synthetic Construct
AKNQAK

SEQ ID NO: 8070 - protein, 6 aa, ARTIFICIAL SEQUENCE
  Synthetic Construct
AKNQDK

SEQ ID NO: 8071 - protein, 6 aa, ARTIFICIAL SEQUENCE
  Synthetic Construct
AKNQEK

SEQ ID NO: 8072 - protein, 6 aa, ARTIFICIAL SEQUENCE
  Synthetic Construct
AKNQFK

SEQ ID NO: 8073 - protein, 6 aa, ARTIFICIAL SEQUENCE
  Synthetic Construct
AKNQGK

SEQ ID NO: 8074 - protein, 6 aa, ARTIFICIAL SEQUENCE
  Synthetic Construct
AKNQHK

SEQ ID NO: 8075 - protein, 6 aa, ARTIFICIAL SEQUENCE
  Synthetic Construct
AKNQIK

SEQ ID NO: 8076 - protein, 6 aa, ARTIFICIAL SEQUENCE
  Synthetic Construct
AKNQLK

SEQ ID NO: 8077 - protein, 6 aa, ARTIFICIAL SEQUENCE
  Synthetic Construct
AKNQNK

SEQ ID NO: 8078 - protein, 6 aa, ARTIFICIAL SEQUENCE
  Synthetic Construct
AKNQQK

SEQ ID NO: 8079 - protein, 6 aa, ARTIFICIAL SEQUENCE
  Synthetic Construct
AKNQRK

SEQ ID NO: 8080 - protein, 6 aa, ARTIFICIAL SEQUENCE
  Synthetic Construct
AKNQSK

SEQ ID NO: 8081 - protein, 6 aa, ARTIFICIAL SEQUENCE
  Synthetic Construct
AKNQTK

SEQ ID NO: 8082 - protein, 6 aa, ARTIFICIAL SEQUENCE
  Synthetic Construct
AKNQYK

SEQ ID NO: 8083 - protein, 6 aa, ARTIFICIAL SEQUENCE
  Synthetic Construct
AKNRAK

SEQ ID NO: 8084 - protein, 6 aa, ARTIFICIAL SEQUENCE
  Synthetic Construct
AKNRDK

SEQ ID NO: 8085 - protein, 6 aa, ARTIFICIAL SEQUENCE
  Synthetic Construct
AKNREK

SEQ ID NO: 8086 - protein, 6 aa, ARTIFICIAL SEQUENCE
  Synthetic Construct
AKNRFK

SEQ ID NO: 8087 - protein, 6 aa, ARTIFICIAL SEQUENCE
  Synthetic Construct
AKNRGK

SEQ ID NO: 8088 - protein, 6 aa, ARTIFICIAL SEQUENCE
  Synthetic Construct
AKNRHK

SEQ ID NO: 8089 - protein, 6 aa, ARTIFICIAL SEQUENCE
  Synthetic Construct
AKNRIK

SEQ ID NO: 8090 - protein, 6 aa, ARTIFICIAL SEQUENCE
  Synthetic Construct
AKNRLK

SEQ ID NO: 8091 - protein, 6 aa, ARTIFICIAL SEQUENCE
  Synthetic Construct
AKNRNK

SEQ ID NO: 8092 - protein, 6 aa, ARTIFICIAL SEQUENCE
  Synthetic Construct
AKNRQK

SEQ ID NO: 8093 - protein, 6 aa, ARTIFICIAL SEQUENCE
  Synthetic Construct
AKNRRK

SEQ ID NO: 8094 - protein, 6 aa, ARTIFICIAL SEQUENCE
  Synthetic Construct
AKNRSK

SEQ ID NO: 8095 - protein, 6 aa, ARTIFICIAL SEQUENCE
  Synthetic Construct
AKNRTK

SEQ ID NO: 8096 - protein, 6 aa, ARTIFICIAL SEQUENCE
  Synthetic Construct
AKNRYK

SEQ ID NO: 8097 - protein, 6 aa, ARTIFICIAL SEQUENCE
  Synthetic Construct
AKNSAK

SEQ ID NO: 8098 - protein, 6 aa, ARTIFICIAL SEQUENCE
  Synthetic Construct
AKNSDK

SEQ ID NO: 8099 - protein, 6 aa, ARTIFICIAL SEQUENCE
  Synthetic Construct
AKNSEK

SEQ ID NO: 8100 - protein, 6 aa, ARTIFICIAL SEQUENCE
  Synthetic Construct
AKNSFK

SEQ ID NO: 8101 - protein, 6 aa, ARTIFICIAL SEQUENCE
  Synthetic Construct
AKNSGK

SEQ ID NO: 8102 - protein, 6 aa, ARTIFICIAL SEQUENCE
  Synthetic Construct
AKNSHK

SEQ ID NO: 8103 - protein, 6 aa, ARTIFICIAL SEQUENCE
  Synthetic Construct
AKNSIK

SEQ ID NO: 8104 - protein, 6 aa, ARTIFICIAL SEQUENCE
  Synthetic Construct
AKNSLK

SEQ ID NO: 8105 - protein, 6 aa, ARTIFICIAL SEQUENCE
  Synthetic Construct
AKNSNK

SEQ ID NO: 8106 - protein, 6 aa, ARTIFICIAL SEQUENCE
  Synthetic Construct
AKNSQK

SEQ ID NO: 8107 - protein, 6 aa, ARTIFICIAL SEQUENCE
  Synthetic Construct
AKNSRK

SEQ ID NO: 8108 - protein, 6 aa, ARTIFICIAL SEQUENCE
  Synthetic Construct
AKNSSK

SEQ ID NO: 8109 - protein, 6 aa, ARTIFICIAL SEQUENCE
  Synthetic Construct
AKNSTK

SEQ ID NO: 8110 - protein, 6 aa, ARTIFICIAL SEQUENCE
  Synthetic Construct
AKNSYK

SEQ ID NO: 8111 - protein, 6 aa, ARTIFICIAL SEQUENCE
  Synthetic Construct
AKNTAK

SEQ ID NO: 8112 - protein, 6 aa, ARTIFICIAL SEQUENCE
  Synthetic Construct
AKNTDK

SEQ ID NO: 8113 - protein, 6 aa, ARTIFICIAL SEQUENCE
  Synthetic Construct
AKNTEK

SEQ ID NO: 8114 - protein, 6 aa, ARTIFICIAL SEQUENCE
  Synthetic Construct
AKNTFK

SEQ ID NO: 8115 - protein, 6 aa, ARTIFICIAL SEQUENCE
  Synthetic Construct
AKNTGK

SEQ ID NO: 8116 - protein, 6 aa, ARTIFICIAL SEQUENCE
  Synthetic Construct
AKNTHK

SEQ ID NO: 8117 - protein, 6 aa, ARTIFICIAL SEQUENCE
  Synthetic Construct
AKNTIK

SEQ ID NO: 8118 - protein, 6 aa, ARTIFICIAL SEQUENCE
  Synthetic Construct
AKNTLK

SEQ ID NO: 8119 - protein, 6 aa, ARTIFICIAL SEQUENCE
  Synthetic Construct
AKNTNK

SEQ ID NO: 8120 - protein, 6 aa, ARTIFICIAL SEQUENCE
  Synthetic Construct
AKNTQK

SEQ ID NO: 8121 - protein, 6 aa, ARTIFICIAL SEQUENCE
  Synthetic Construct
AKNTRK

SEQ ID NO: 8122 - protein, 6 aa, ARTIFICIAL SEQUENCE
  Synthetic Construct
AKNTSK

SEQ ID NO: 8123 - protein, 6 aa, ARTIFICIAL SEQUENCE
  Synthetic Construct
AKNTTK

SEQ ID NO: 8124 - protein, 6 aa, ARTIFICIAL SEQUENCE
  Synthetic Construct
AKNTYK

SEQ ID NO: 8125 - protein, 6 aa, ARTIFICIAL SEQUENCE
  Synthetic Construct
AKNYAK

SEQ ID NO: 8126 - protein, 6 aa, ARTIFICIAL SEQUENCE
  Synthetic Construct
AKNYDK

SEQ ID NO: 8127 - protein, 6 aa, ARTIFICIAL SEQUENCE
  Synthetic Construct
AKNYEK

SEQ ID NO: 8128 - protein, 6 aa, ARTIFICIAL SEQUENCE
  Synthetic Construct
AKNYFK

SEQ ID NO: 8129 - protein, 6 aa, ARTIFICIAL SEQUENCE
  Synthetic Construct
AKNYGK

SEQ ID NO: 8130 - protein, 6 aa, ARTIFICIAL SEQUENCE
  Synthetic Construct
AKNYHK

SEQ ID NO: 8131 - protein, 6 aa, ARTIFICIAL SEQUENCE
  Synthetic Construct
AKNYIK

SEQ ID NO: 8132 - protein, 6 aa, ARTIFICIAL SEQUENCE
  Synthetic Construct
AKNYLK

SEQ ID NO: 8133 - protein, 6 aa, ARTIFICIAL SEQUENCE
  Synthetic Construct
AKNYNK

SEQ ID NO: 8134 - protein, 6 aa, ARTIFICIAL SEQUENCE
  Synthetic Construct
AKNYQK

SEQ ID NO: 8135 - protein, 6 aa, ARTIFICIAL SEQUENCE
  Synthetic Construct
AKNYRK

SEQ ID NO: 8136 - protein, 6 aa, ARTIFICIAL SEQUENCE
  Synthetic Construct
AKNYSK

SEQ ID NO: 8137 - protein, 6 aa, ARTIFICIAL SEQUENCE
  Synthetic Construct
AKNYTK

SEQ ID NO: 8138 - protein, 6 aa, ARTIFICIAL SEQUENCE
  Synthetic Construct
AKNYYK

SEQ ID NO: 8139 - protein, 6 aa, ARTIFICIAL SEQUENCE
  Synthetic Construct
AKPAAK

SEQ ID NO: 8140 - protein, 6 aa, ARTIFICIAL SEQUENCE
  Synthetic Construct
AKPADK

SEQ ID NO: 8141 - protein, 6 aa, ARTIFICIAL SEQUENCE
  Synthetic Construct
AKPAEK

SEQ ID NO: 8142 - protein, 6 aa, ARTIFICIAL SEQUENCE
  Synthetic Construct
AKPAFK

SEQ ID NO: 8143 - protein, 6 aa, ARTIFICIAL SEQUENCE
  Synthetic Construct
AKPAGK

SEQ ID NO: 8144 - protein, 6 aa, ARTIFICIAL SEQUENCE
  Synthetic Construct
AKPAHK

SEQ ID NO: 8145 - protein, 6 aa, ARTIFICIAL SEQUENCE
  Synthetic Construct
AKPAIK

SEQ ID NO: 8146 - protein, 6 aa, ARTIFICIAL SEQUENCE
  Synthetic Construct
AKPALK

SEQ ID NO: 8147 - protein, 6 aa, ARTIFICIAL SEQUENCE
  Synthetic Construct
AKPANK

SEQ ID NO: 8148 - protein, 6 aa, ARTIFICIAL SEQUENCE
  Synthetic Construct
AKPAQK

SEQ ID NO: 8149 - protein, 6 aa, ARTIFICIAL SEQUENCE
  Synthetic Construct
AKPARK

SEQ ID NO: 8150 - protein, 6 aa, ARTIFICIAL SEQUENCE
  Synthetic Construct
AKPASK

SEQ ID NO: 8151 - protein, 6 aa, ARTIFICIAL SEQUENCE
  Synthetic Construct
AKPATK

SEQ ID NO: 8152 - protein, 6 aa, ARTIFICIAL SEQUENCE
  Synthetic Construct
AKPAYK

SEQ ID NO: 8153 - protein, 6 aa, ARTIFICIAL SEQUENCE
  Synthetic Construct
AKPDAK

SEQ ID NO: 8154 - protein, 6 aa, ARTIFICIAL SEQUENCE
  Synthetic Construct
AKPDDK

SEQ ID NO: 8155 - protein, 6 aa, ARTIFICIAL SEQUENCE
  Synthetic Construct
AKPDEK

SEQ ID NO: 8156 - protein, 6 aa, ARTIFICIAL SEQUENCE
  Synthetic Construct
AKPDFK

SEQ ID NO: 8157 - protein, 6 aa, ARTIFICIAL SEQUENCE
  Synthetic Construct
AKPDGK

SEQ ID NO: 8158 - protein, 6 aa, ARTIFICIAL SEQUENCE
  Synthetic Construct
AKPDHK

SEQ ID NO: 8159 - protein, 6 aa, ARTIFICIAL SEQUENCE
  Synthetic Construct
AKPDIK

SEQ ID NO: 8160 - protein, 6 aa, ARTIFICIAL SEQUENCE
  Synthetic Construct
AKPDLK

SEQ ID NO: 8161 - protein, 6 aa, ARTIFICIAL SEQUENCE
  Synthetic Construct
AKPDNK

SEQ ID NO: 8162 - protein, 6 aa, ARTIFICIAL SEQUENCE
  Synthetic Construct
AKPDQK

SEQ ID NO: 8163 - protein, 6 aa, ARTIFICIAL SEQUENCE
  Synthetic Construct
AKPDRK

SEQ ID NO: 8164 - protein, 6 aa, ARTIFICIAL SEQUENCE
  Synthetic Construct
AKPDSK

SEQ ID NO: 8165 - protein, 6 aa, ARTIFICIAL SEQUENCE
  Synthetic Construct
AKPDTK

SEQ ID NO: 8166 - protein, 6 aa, ARTIFICIAL SEQUENCE
  Synthetic Construct
AKPDYK

SEQ ID NO: 8167 - protein, 6 aa, ARTIFICIAL SEQUENCE
  Synthetic Construct
AKPEAK

SEQ ID NO: 8168 - protein, 6 aa, ARTIFICIAL SEQUENCE
  Synthetic Construct
AKPEDK

SEQ ID NO: 8169 - protein, 6 aa, ARTIFICIAL SEQUENCE
  Synthetic Construct
AKPEEK

SEQ ID NO: 8170 - protein, 6 aa, ARTIFICIAL SEQUENCE
  Synthetic Construct
AKPEFK

SEQ ID NO: 8171 - protein, 6 aa, ARTIFICIAL SEQUENCE
  Synthetic Construct
AKPEGK

SEQ ID NO: 8172 - protein, 6 aa, ARTIFICIAL SEQUENCE
  Synthetic Construct
AKPEHK

SEQ ID NO: 8173 - protein, 6 aa, ARTIFICIAL SEQUENCE
  Synthetic Construct
AKPEIK

SEQ ID NO: 8174 - protein, 6 aa, ARTIFICIAL SEQUENCE
  Synthetic Construct
AKPELK

SEQ ID NO: 8175 - protein, 6 aa, ARTIFICIAL SEQUENCE
  Synthetic Construct
AKPENK

SEQ ID NO: 8176 - protein, 6 aa, ARTIFICIAL SEQUENCE
  Synthetic Construct
AKPEQK

SEQ ID NO: 8177 - protein, 6 aa, ARTIFICIAL SEQUENCE
  Synthetic Construct
AKPERK

SEQ ID NO: 8178 - protein, 6 aa, ARTIFICIAL SEQUENCE
  Synthetic Construct
AKPESK

SEQ ID NO: 8179 - protein, 6 aa, ARTIFICIAL SEQUENCE
  Synthetic Construct
AKPETK

SEQ ID NO: 8180 - protein, 6 aa, ARTIFICIAL SEQUENCE
  Synthetic Construct
AKPEYK

SEQ ID NO: 8181 - protein, 6 aa, ARTIFICIAL SEQUENCE
  Synthetic Construct
AKPFAK

SEQ ID NO: 8182 - protein, 6 aa, ARTIFICIAL SEQUENCE
  Synthetic Construct
AKPFDK

SEQ ID NO: 8183 - protein, 6 aa, ARTIFICIAL SEQUENCE
  Synthetic Construct
AKPFEK

SEQ ID NO: 8184 - protein, 6 aa, ARTIFICIAL SEQUENCE
  Synthetic Construct
AKPFFK

SEQ ID NO: 8185 - protein, 6 aa, ARTIFICIAL SEQUENCE
  Synthetic Construct
AKPFGK

SEQ ID NO: 8186 - protein, 6 aa, ARTIFICIAL SEQUENCE
  Synthetic Construct
AKPFHK

SEQ ID NO: 8187 - protein, 6 aa, ARTIFICIAL SEQUENCE
  Synthetic Construct
AKPFIK

SEQ ID NO: 8188 - protein, 6 aa, ARTIFICIAL SEQUENCE
  Synthetic Construct
AKPFLK

SEQ ID NO: 8189 - protein, 6 aa, ARTIFICIAL SEQUENCE
  Synthetic Construct
AKPFNK

SEQ ID NO: 8190 - protein, 6 aa, ARTIFICIAL SEQUENCE
  Synthetic Construct
AKPFQK

SEQ ID NO: 8191 - protein, 6 aa, ARTIFICIAL SEQUENCE
  Synthetic Construct
AKPFRK

SEQ ID NO: 8192 - protein, 6 aa, ARTIFICIAL SEQUENCE
  Synthetic Construct
AKPFSK

SEQ ID NO: 8193 - protein, 6 aa, ARTIFICIAL SEQUENCE
  Synthetic Construct
AKPFTK

SEQ ID NO: 8194 - protein, 6 aa, ARTIFICIAL SEQUENCE
  Synthetic Construct
AKPFYK

SEQ ID NO: 8195 - protein, 6 aa, ARTIFICIAL SEQUENCE
  Synthetic Construct
AKPGAK

SEQ ID NO: 8196 - protein, 6 aa, ARTIFICIAL SEQUENCE
  Synthetic Construct
AKPGDK

SEQ ID NO: 8197 - protein, 6 aa, ARTIFICIAL SEQUENCE
  Synthetic Construct
AKPGEK

SEQ ID NO: 8198 - protein, 6 aa, ARTIFICIAL SEQUENCE
  Synthetic Construct
AKPGFK

SEQ ID NO: 8199 - protein, 6 aa, ARTIFICIAL SEQUENCE
  Synthetic Construct
AKPGGK

SEQ ID NO: 8200 - protein, 6 aa, ARTIFICIAL SEQUENCE
  Synthetic Construct
AKPGHK

SEQ ID NO: 8201 - protein, 6 aa, ARTIFICIAL SEQUENCE
  Synthetic Construct
AKPGIK

SEQ ID NO: 8202 - protein, 6 aa, ARTIFICIAL SEQUENCE
  Synthetic Construct
AKPGLK

SEQ ID NO: 8203 - protein, 6 aa, ARTIFICIAL SEQUENCE
  Synthetic Construct
AKPGNK

SEQ ID NO: 8204 - protein, 6 aa, ARTIFICIAL SEQUENCE
  Synthetic Construct
AKPGQK

SEQ ID NO: 8205 - protein, 6 aa, ARTIFICIAL SEQUENCE
  Synthetic Construct
AKPGRK

SEQ ID NO: 8206 - protein, 6 aa, ARTIFICIAL SEQUENCE
  Synthetic Construct
AKPGSK

SEQ ID NO: 8207 - protein, 6 aa, ARTIFICIAL SEQUENCE
  Synthetic Construct
AKPGTK

SEQ ID NO: 8208 - protein, 6 aa, ARTIFICIAL SEQUENCE
  Synthetic Construct
AKPGYK

SEQ ID NO: 8209 - protein, 6 aa, ARTIFICIAL SEQUENCE
  Synthetic Construct
AKPHAK

SEQ ID NO: 8210 - protein, 6 aa, ARTIFICIAL SEQUENCE
  Synthetic Construct
AKPHDK

SEQ ID NO: 8211 - protein, 6 aa, ARTIFICIAL SEQUENCE
  Synthetic Construct
AKPHEK

SEQ ID NO: 8212 - protein, 6 aa, ARTIFICIAL SEQUENCE
  Synthetic Construct
AKPHFK

SEQ ID NO: 8213 - protein, 6 aa, ARTIFICIAL SEQUENCE
  Synthetic Construct
AKPHGK

SEQ ID NO: 8214 - protein, 6 aa, ARTIFICIAL SEQUENCE
  Synthetic Construct
AKPHHK

SEQ ID NO: 8215 - protein, 6 aa, ARTIFICIAL SEQUENCE
  Synthetic Construct
AKPHIK

SEQ ID NO: 8216 - protein, 6 aa, ARTIFICIAL SEQUENCE
  Synthetic Construct
AKPHLK

SEQ ID NO: 8217 - protein, 6 aa, ARTIFICIAL SEQUENCE
  Synthetic Construct
AKPHNK

SEQ ID NO: 8218 - protein, 6 aa, ARTIFICIAL SEQUENCE
  Synthetic Construct
AKPHQK

SEQ ID NO: 8219 - protein, 6 aa, ARTIFICIAL SEQUENCE
  Synthetic Construct
AKPHRK

SEQ ID NO: 8220 - protein, 6 aa, ARTIFICIAL SEQUENCE
  Synthetic Construct
AKPHSK

SEQ ID NO: 8221 - protein, 6 aa, ARTIFICIAL SEQUENCE
  Synthetic Construct
AKPHTK

SEQ ID NO: 8222 - protein, 6 aa, ARTIFICIAL SEQUENCE
  Synthetic Construct
AKPHYK

SEQ ID NO: 8223 - protein, 6 aa, ARTIFICIAL SEQUENCE
  Synthetic Construct
AKPIAK

SEQ ID NO: 8224 - protein, 6 aa, ARTIFICIAL SEQUENCE
  Synthetic Construct
AKPIDK

SEQ ID NO: 8225 - protein, 6 aa, ARTIFICIAL SEQUENCE
  Synthetic Construct
AKPIEK

SEQ ID NO: 8226 - protein, 6 aa, ARTIFICIAL SEQUENCE
  Synthetic Construct
AKPIFK

SEQ ID NO: 8227 - protein, 6 aa, ARTIFICIAL SEQUENCE
  Synthetic Construct
AKPIGK

SEQ ID NO: 8228 - protein, 6 aa, ARTIFICIAL SEQUENCE
  Synthetic Construct
AKPIHK

SEQ ID NO: 8229 - protein, 6 aa, ARTIFICIAL SEQUENCE
  Synthetic Construct
AKPIIK

SEQ ID NO: 8230 - protein, 6 aa, ARTIFICIAL SEQUENCE
  Synthetic Construct
AKPILK

SEQ ID NO: 8231 - protein, 6 aa, ARTIFICIAL SEQUENCE
  Synthetic Construct
AKPINK

SEQ ID NO: 8232 - protein, 6 aa, ARTIFICIAL SEQUENCE
  Synthetic Construct
AKPIQK

SEQ ID NO: 8233 - protein, 6 aa, ARTIFICIAL SEQUENCE
  Synthetic Construct
AKPIRK

SEQ ID NO: 8234 - protein, 6 aa, ARTIFICIAL SEQUENCE
  Synthetic Construct
AKPISK

SEQ ID NO: 8235 - protein, 6 aa, ARTIFICIAL SEQUENCE
  Synthetic Construct
AKPITK

SEQ ID NO: 8236 - protein, 6 aa, ARTIFICIAL SEQUENCE
  Synthetic Construct
AKPIYK

SEQ ID NO: 8237 - protein, 6 aa, ARTIFICIAL SEQUENCE
  Synthetic Construct
AKPLAK

SEQ ID NO: 8238 - protein, 6 aa, ARTIFICIAL SEQUENCE
  Synthetic Construct
AKPLDK

SEQ ID NO: 8239 - protein, 6 aa, ARTIFICIAL SEQUENCE
  Synthetic Construct
AKPLEK

SEQ ID NO: 8240 - protein, 6 aa, ARTIFICIAL SEQUENCE
  Synthetic Construct
AKPLFK

SEQ ID NO: 8241 - protein, 6 aa, ARTIFICIAL SEQUENCE
  Synthetic Construct
AKPLGK

SEQ ID NO: 8242 - protein, 6 aa, ARTIFICIAL SEQUENCE
  Synthetic Construct
AKPLHK

SEQ ID NO: 8243 - protein, 6 aa, ARTIFICIAL SEQUENCE
  Synthetic Construct
AKPLIK

SEQ ID NO: 8244 - protein, 6 aa, ARTIFICIAL SEQUENCE
  Synthetic Construct
AKPLLK

SEQ ID NO: 8245 - protein, 6 aa, ARTIFICIAL SEQUENCE
  Synthetic Construct
AKPLNK

SEQ ID NO: 8246 - protein, 6 aa, ARTIFICIAL SEQUENCE
  Synthetic Construct
AKPLQK

SEQ ID NO: 8247 - protein, 6 aa, ARTIFICIAL SEQUENCE
  Synthetic Construct
AKPLRK

SEQ ID NO: 8248 - protein, 6 aa, ARTIFICIAL SEQUENCE
  Synthetic Construct
AKPLSK

SEQ ID NO: 8249 - protein, 6 aa, ARTIFICIAL SEQUENCE
  Synthetic Construct
AKPLTK

SEQ ID NO: 8250 - protein, 6 aa, ARTIFICIAL SEQUENCE
  Synthetic Construct
AKPLYK

SEQ ID NO: 8251 - protein, 6 aa, ARTIFICIAL SEQUENCE
  Synthetic Construct
AKPNAK

SEQ ID NO: 8252 - protein, 6 aa, ARTIFICIAL SEQUENCE
  Synthetic Construct
AKPNDK

SEQ ID NO: 8253 - protein, 6 aa, ARTIFICIAL SEQUENCE
  Synthetic Construct
AKPNEK

SEQ ID NO: 8254 - protein, 6 aa, ARTIFICIAL SEQUENCE
  Synthetic Construct
AKPNFK

SEQ ID NO: 8255 - protein, 6 aa, ARTIFICIAL SEQUENCE
  Synthetic Construct
AKPNGK

SEQ ID NO: 8256 - protein, 6 aa, ARTIFICIAL SEQUENCE
  Synthetic Construct
AKPNHK

SEQ ID NO: 8257 - protein, 6 aa, ARTIFICIAL SEQUENCE
  Synthetic Construct
AKPNIK

SEQ ID NO: 8258 - protein, 6 aa, ARTIFICIAL SEQUENCE
  Synthetic Construct
AKPNLK

SEQ ID NO: 8259 - protein, 6 aa, ARTIFICIAL SEQUENCE
  Synthetic Construct
AKPNNK

SEQ ID NO: 8260 - protein, 6 aa, ARTIFICIAL SEQUENCE
  Synthetic Construct
AKPNQK

SEQ ID NO: 8261 - protein, 6 aa, ARTIFICIAL SEQUENCE
  Synthetic Construct
AKPNRK

SEQ ID NO: 8262 - protein, 6 aa, ARTIFICIAL SEQUENCE
  Synthetic Construct
AKPNSK

SEQ ID NO: 8263 - protein, 6 aa, ARTIFICIAL SEQUENCE
  Synthetic Construct
AKPNTK

SEQ ID NO: 8264 - protein, 6 aa, ARTIFICIAL SEQUENCE
  Synthetic Construct
AKPNYK

SEQ ID NO: 8265 - protein, 6 aa, ARTIFICIAL SEQUENCE
  Synthetic Construct
AKPQAK

SEQ ID NO: 8266 - protein, 6 aa, ARTIFICIAL SEQUENCE
  Synthetic Construct
AKPQDK

SEQ ID NO: 8267 - protein, 6 aa, ARTIFICIAL SEQUENCE
  Synthetic Construct
AKPQEK

SEQ ID NO: 8268 - protein, 6 aa, ARTIFICIAL SEQUENCE
  Synthetic Construct
AKPQFK

SEQ ID NO: 8269 - protein, 6 aa, ARTIFICIAL SEQUENCE
  Synthetic Construct
AKPQGK

SEQ ID NO: 8270 - protein, 6 aa, ARTIFICIAL SEQUENCE
  Synthetic Construct
AKPQHK

SEQ ID NO: 8271 - protein, 6 aa, ARTIFICIAL SEQUENCE
  Synthetic Construct
AKPQIK

SEQ ID NO: 8272 - protein, 6 aa, ARTIFICIAL SEQUENCE
  Synthetic Construct
AKPQLK

SEQ ID NO: 8273 - protein, 6 aa, ARTIFICIAL SEQUENCE
  Synthetic Construct
AKPQNK

SEQ ID NO: 8274 - protein, 6 aa, ARTIFICIAL SEQUENCE
  Synthetic Construct
AKPQQK

SEQ ID NO: 8275 - protein, 6 aa, ARTIFICIAL SEQUENCE
  Synthetic Construct
AKPQRK

SEQ ID NO: 8276 - protein, 6 aa, ARTIFICIAL SEQUENCE
  Synthetic Construct
AKPQSK

SEQ ID NO: 8277 - protein, 6 aa, ARTIFICIAL SEQUENCE
  Synthetic Construct
AKPQTK

SEQ ID NO: 8278 - protein, 6 aa, ARTIFICIAL SEQUENCE
  Synthetic Construct
AKPQYK

SEQ ID NO: 8279 - protein, 6 aa, ARTIFICIAL SEQUENCE
  Synthetic Construct
AKPRAK

SEQ ID NO: 8280 - protein, 6 aa, ARTIFICIAL SEQUENCE
  Synthetic Construct
AKPRDK

SEQ ID NO: 8281 - protein, 6 aa, ARTIFICIAL SEQUENCE
  Synthetic Construct
AKPREK

SEQ ID NO: 8282 - protein, 6 aa, ARTIFICIAL SEQUENCE
  Synthetic Construct
AKPRFK

SEQ ID NO: 8283 - protein, 6 aa, ARTIFICIAL SEQUENCE
  Synthetic Construct
AKPRGK

SEQ ID NO: 8284 - protein, 6 aa, ARTIFICIAL SEQUENCE
  Synthetic Construct
AKPRHK

SEQ ID NO: 8285 - protein, 6 aa, ARTIFICIAL SEQUENCE
  Synthetic Construct
AKPRIK

SEQ ID NO: 8286 - protein, 6 aa, ARTIFICIAL SEQUENCE
  Synthetic Construct
AKPRLK

SEQ ID NO: 8287 - protein, 6 aa, ARTIFICIAL SEQUENCE
  Synthetic Construct
AKPRNK

SEQ ID NO: 8288 - protein, 6 aa, ARTIFICIAL SEQUENCE
  Synthetic Construct
AKPRQK

SEQ ID NO: 8289 - protein, 6 aa, ARTIFICIAL SEQUENCE
  Synthetic Construct
AKPRRK

SEQ ID NO: 8290 - protein, 6 aa, ARTIFICIAL SEQUENCE
  Synthetic Construct
AKPRSK

SEQ ID NO: 8291 - protein, 6 aa, ARTIFICIAL SEQUENCE
  Synthetic Construct
AKPRTK

SEQ ID NO: 8292 - protein, 6 aa, ARTIFICIAL SEQUENCE
  Synthetic Construct
AKPRYK

SEQ ID NO: 8293 - protein, 6 aa, ARTIFICIAL SEQUENCE
  Synthetic Construct
AKPSAK

SEQ ID NO: 8294 - protein, 6 aa, ARTIFICIAL SEQUENCE
  Synthetic Construct
AKPSDK

SEQ ID NO: 8295 - protein, 6 aa, ARTIFICIAL SEQUENCE
  Synthetic Construct
AKPSEK

SEQ ID NO: 8296 - protein, 6 aa, ARTIFICIAL SEQUENCE
  Synthetic Construct
AKPSFK

SEQ ID NO: 8297 - protein, 6 aa, ARTIFICIAL SEQUENCE
  Synthetic Construct
AKPSGK

SEQ ID NO: 8298 - protein, 6 aa, ARTIFICIAL SEQUENCE
  Synthetic Construct
AKPSHK

SEQ ID NO: 8299 - protein, 6 aa, ARTIFICIAL SEQUENCE
  Synthetic Construct
AKPSIK

SEQ ID NO: 8300 - protein, 6 aa, ARTIFICIAL SEQUENCE
  Synthetic Construct
AKPSLK

SEQ ID NO: 8301 - protein, 6 aa, ARTIFICIAL SEQUENCE
  Synthetic Construct
AKPSNK

SEQ ID NO: 8302 - protein, 6 aa, ARTIFICIAL SEQUENCE
  Synthetic Construct
AKPSQK

SEQ ID NO: 8303 - protein, 6 aa, ARTIFICIAL SEQUENCE
  Synthetic Construct
AKPSRK

SEQ ID NO: 8304 - protein, 6 aa, ARTIFICIAL SEQUENCE
  Synthetic Construct
AKPSSK

SEQ ID NO: 8305 - protein, 6 aa, ARTIFICIAL SEQUENCE
  Synthetic Construct
AKPSTK

SEQ ID NO: 8306 - protein, 6 aa, ARTIFICIAL SEQUENCE
  Synthetic Construct
AKPSYK

SEQ ID NO: 8307 - protein, 6 aa, ARTIFICIAL SEQUENCE
  Synthetic Construct
AKPTAK

SEQ ID NO: 8308 - protein, 6 aa, ARTIFICIAL SEQUENCE
  Synthetic Construct
AKPTDK

SEQ ID NO: 8309 - protein, 6 aa, ARTIFICIAL SEQUENCE
  Synthetic Construct
AKPTEK

SEQ ID NO: 8310 - protein, 6 aa, ARTIFICIAL SEQUENCE
  Synthetic Construct
AKPTFK

SEQ ID NO: 8311 - protein, 6 aa, ARTIFICIAL SEQUENCE
  Synthetic Construct
AKPTGK

SEQ ID NO: 8312 - protein, 6 aa, ARTIFICIAL SEQUENCE
  Synthetic Construct
AKPTHK

SEQ ID NO: 8313 - protein, 6 aa, ARTIFICIAL SEQUENCE
  Synthetic Construct
AKPTIK

SEQ ID NO: 8314 - protein, 6 aa, ARTIFICIAL SEQUENCE
  Synthetic Construct
AKPTLK

SEQ ID NO: 8315 - protein, 6 aa, ARTIFICIAL SEQUENCE
  Synthetic Construct
AKPTNK

SEQ ID NO: 8316 - protein, 6 aa, ARTIFICIAL SEQUENCE
  Synthetic Construct
AKPTQK

SEQ ID NO: 8317 - protein, 6 aa, ARTIFICIAL SEQUENCE
  Synthetic Construct
AKPTRK

SEQ ID NO: 8318 - protein, 6 aa, ARTIFICIAL SEQUENCE
  Synthetic Construct
AKPTSK

SEQ ID NO: 8319 - protein, 6 aa, ARTIFICIAL SEQUENCE
  Synthetic Construct
AKPTTK

SEQ ID NO: 8320 - protein, 6 aa, ARTIFICIAL SEQUENCE
  Synthetic Construct
AKPTYK

SEQ ID NO: 8321 - protein, 6 aa, ARTIFICIAL SEQUENCE
  Synthetic Construct
AKPYAK

SEQ ID NO: 8322 - protein, 6 aa, ARTIFICIAL SEQUENCE
  Synthetic Construct
AKPYDK

SEQ ID NO: 8323 - protein, 6 aa, ARTIFICIAL SEQUENCE
  Synthetic Construct
AKPYEK

SEQ ID NO: 8324 - protein, 6 aa, ARTIFICIAL SEQUENCE
  Synthetic Construct
AKPYFK

SEQ ID NO: 8325 - protein, 6 aa, ARTIFICIAL SEQUENCE
  Synthetic Construct
AKPYGK

SEQ ID NO: 8326 - protein, 6 aa, ARTIFICIAL SEQUENCE
  Synthetic Construct
AKPYHK

SEQ ID NO: 8327 - protein, 6 aa, ARTIFICIAL SEQUENCE
  Synthetic Construct
AKPYIK

SEQ ID NO: 8328 - protein, 6 aa, ARTIFICIAL SEQUENCE
  Synthetic Construct
AKPYLK

SEQ ID NO: 8329 - protein, 6 aa, ARTIFICIAL SEQUENCE
  Synthetic Construct
AKPYNK

SEQ ID NO: 8330 - protein, 6 aa, ARTIFICIAL SEQUENCE
  Synthetic Construct
AKPYQK

SEQ ID NO: 8331 - protein, 6 aa, ARTIFICIAL SEQUENCE
  Synthetic Construct
AKPYRK

SEQ ID NO: 8332 - protein, 6 aa, ARTIFICIAL SEQUENCE
  Synthetic Construct
AKPYSK

SEQ ID NO: 8333 - protein, 6 aa, ARTIFICIAL SEQUENCE
  Synthetic Construct
AKPYTK

SEQ ID NO: 8334 - protein, 6 aa, ARTIFICIAL SEQUENCE
  Synthetic Construct
AKPYYK

SEQ ID NO: 8335 - protein, 6 aa, ARTIFICIAL SEQUENCE
  Synthetic Construct
AKQAAK

SEQ ID NO: 8336 - protein, 6 aa, ARTIFICIAL SEQUENCE
  Synthetic Construct
AKQADK

SEQ ID NO: 8337 - protein, 6 aa, ARTIFICIAL SEQUENCE
  Synthetic Construct
AKQAEK

SEQ ID NO: 8338 - protein, 6 aa, ARTIFICIAL SEQUENCE
  Synthetic Construct
AKQAFK

SEQ ID NO: 8339 - protein, 6 aa, ARTIFICIAL SEQUENCE
  Synthetic Construct
AKQAGK

SEQ ID NO: 8340 - protein, 6 aa, ARTIFICIAL SEQUENCE
  Synthetic Construct
AKQAHK

SEQ ID NO: 8341 - protein, 6 aa, ARTIFICIAL SEQUENCE
  Synthetic Construct
AKQAIK

SEQ ID NO: 8342 - protein, 6 aa, ARTIFICIAL SEQUENCE
  Synthetic Construct
AKQALK

SEQ ID NO: 8343 - protein, 6 aa, ARTIFICIAL SEQUENCE
  Synthetic Construct
AKQANK

SEQ ID NO: 8344 - protein, 6 aa, ARTIFICIAL SEQUENCE
  Synthetic Construct
AKQAQK

SEQ ID NO: 8345 - protein, 6 aa, ARTIFICIAL SEQUENCE
  Synthetic Construct
AKQARK

SEQ ID NO: 8346 - protein, 6 aa, ARTIFICIAL SEQUENCE
  Synthetic Construct
AKQASK

SEQ ID NO: 8347 - protein, 6 aa, ARTIFICIAL SEQUENCE
  Synthetic Construct
AKQATK

SEQ ID NO: 8348 - protein, 6 aa, ARTIFICIAL SEQUENCE
  Synthetic Construct
AKQAYK

SEQ ID NO: 8349 - protein, 6 aa, ARTIFICIAL SEQUENCE
  Synthetic Construct
AKQDAK

SEQ ID NO: 8350 - protein, 6 aa, ARTIFICIAL SEQUENCE
  Synthetic Construct
AKQDDK

SEQ ID NO: 8351 - protein, 6 aa, ARTIFICIAL SEQUENCE
  Synthetic Construct
AKQDEK

SEQ ID NO: 8352 - protein, 6 aa, ARTIFICIAL SEQUENCE
  Synthetic Construct
AKQDFK

SEQ ID NO: 8353 - protein, 6 aa, ARTIFICIAL SEQUENCE
  Synthetic Construct
AKQDGK

SEQ ID NO: 8354 - protein, 6 aa, ARTIFICIAL SEQUENCE
  Synthetic Construct
AKQDHK

SEQ ID NO: 8355 - protein, 6 aa, ARTIFICIAL SEQUENCE
  Synthetic Construct
AKQDIK

SEQ ID NO: 8356 - protein, 6 aa, ARTIFICIAL SEQUENCE
  Synthetic Construct
AKQDLK

SEQ ID NO: 8357 - protein, 6 aa, ARTIFICIAL SEQUENCE
  Synthetic Construct
AKQDNK

SEQ ID NO: 8358 - protein, 6 aa, ARTIFICIAL SEQUENCE
  Synthetic Construct
AKQDQK

SEQ ID NO: 8359 - protein, 6 aa, ARTIFICIAL SEQUENCE
  Synthetic Construct
AKQDRK

SEQ ID NO: 8360 - protein, 6 aa, ARTIFICIAL SEQUENCE
  Synthetic Construct
AKQDSK

SEQ ID NO: 8361 - protein, 6 aa, ARTIFICIAL SEQUENCE
  Synthetic Construct
AKQDTK

SEQ ID NO: 8362 - protein, 6 aa, ARTIFICIAL SEQUENCE
  Synthetic Construct
AKQDYK

SEQ ID NO: 8363 - protein, 6 aa, ARTIFICIAL SEQUENCE
  Synthetic Construct
AKQEAK

SEQ ID NO: 8364 - protein, 6 aa, ARTIFICIAL SEQUENCE
  Synthetic Construct
AKQEDK

SEQ ID NO: 8365 - protein, 6 aa, ARTIFICIAL SEQUENCE
  Synthetic Construct
AKQEEK

SEQ ID NO: 8366 - protein, 6 aa, ARTIFICIAL SEQUENCE
  Synthetic Construct
AKQEFK

SEQ ID NO: 8367 - protein, 6 aa, ARTIFICIAL SEQUENCE
  Synthetic Construct
AKQEGK

SEQ ID NO: 8368 - protein, 6 aa, ARTIFICIAL SEQUENCE
  Synthetic Construct
AKQEHK

SEQ ID NO: 8369 - protein, 6 aa, ARTIFICIAL SEQUENCE
  Synthetic Construct
AKQEIK

SEQ ID NO: 8370 - protein, 6 aa, ARTIFICIAL SEQUENCE
  Synthetic Construct
AKQELK

SEQ ID NO: 8371 - protein, 6 aa, ARTIFICIAL SEQUENCE
  Synthetic Construct
AKQENK

SEQ ID NO: 8372 - protein, 6 aa, ARTIFICIAL SEQUENCE
  Synthetic Construct
AKQEQK

SEQ ID NO: 8373 - protein, 6 aa, ARTIFICIAL SEQUENCE
  Synthetic Construct
AKQERK

SEQ ID NO: 8374 - protein, 6 aa, ARTIFICIAL SEQUENCE
  Synthetic Construct
AKQESK

SEQ ID NO: 8375 - protein, 6 aa, ARTIFICIAL SEQUENCE
  Synthetic Construct
AKQETK

SEQ ID NO: 8376 - protein, 6 aa, ARTIFICIAL SEQUENCE
  Synthetic Construct
AKQEYK

SEQ ID NO: 8377 - protein, 6 aa, ARTIFICIAL SEQUENCE
  Synthetic Construct
AKQFAK

SEQ ID NO: 8378 - protein, 6 aa, ARTIFICIAL SEQUENCE
  Synthetic Construct
AKQFDK

SEQ ID NO: 8379 - protein, 6 aa, ARTIFICIAL SEQUENCE
  Synthetic Construct
AKQFEK

SEQ ID NO: 8380 - protein, 6 aa, ARTIFICIAL SEQUENCE
  Synthetic Construct
AKQFFK

SEQ ID NO: 8381 - protein, 6 aa, ARTIFICIAL SEQUENCE
  Synthetic Construct
AKQFGK

SEQ ID NO: 8382 - protein, 6 aa, ARTIFICIAL SEQUENCE
  Synthetic Construct
AKQFHK

SEQ ID NO: 8383 - protein, 6 aa, ARTIFICIAL SEQUENCE
  Synthetic Construct
AKQFIK

SEQ ID NO: 8384 - protein, 6 aa, ARTIFICIAL SEQUENCE
  Synthetic Construct
AKQFLK

SEQ ID NO: 8385 - protein, 6 aa, ARTIFICIAL SEQUENCE
  Synthetic Construct
AKQFNK

SEQ ID NO: 8386 - protein, 6 aa, ARTIFICIAL SEQUENCE
  Synthetic Construct
AKQFQK

SEQ ID NO: 8387 - protein, 6 aa, ARTIFICIAL SEQUENCE
  Synthetic Construct
AKQFRK

SEQ ID NO: 8388 - protein, 6 aa, ARTIFICIAL SEQUENCE
  Synthetic Construct
AKQFSK

SEQ ID NO: 8389 - protein, 6 aa, ARTIFICIAL SEQUENCE
  Synthetic Construct
AKQFTK

SEQ ID NO: 8390 - protein, 6 aa, ARTIFICIAL SEQUENCE
  Synthetic Construct
AKQFYK

SEQ ID NO: 8391 - protein, 6 aa, ARTIFICIAL SEQUENCE
  Synthetic Construct
AKQGAK

SEQ ID NO: 8392 - protein, 6 aa, ARTIFICIAL SEQUENCE
  Synthetic Construct
AKQGDK

SEQ ID NO: 8393 - protein, 6 aa, ARTIFICIAL SEQUENCE
  Synthetic Construct
AKQGEK

SEQ ID NO: 8394 - protein, 6 aa, ARTIFICIAL SEQUENCE
  Synthetic Construct
AKQGFK

SEQ ID NO: 8395 - protein, 6 aa, ARTIFICIAL SEQUENCE
  Synthetic Construct
AKQGGK

SEQ ID NO: 8396 - protein, 6 aa, ARTIFICIAL SEQUENCE
  Synthetic Construct
AKQGHK

SEQ ID NO: 8397 - protein, 6 aa, ARTIFICIAL SEQUENCE
  Synthetic Construct
AKQGIK

SEQ ID NO: 8398 - protein, 6 aa, ARTIFICIAL SEQUENCE
  Synthetic Construct
AKQGLK

SEQ ID NO: 8399 - protein, 6 aa, ARTIFICIAL SEQUENCE
  Synthetic Construct
AKQGNK

SEQ ID NO: 8400 - protein, 6 aa, ARTIFICIAL SEQUENCE
  Synthetic Construct
AKQGQK

SEQ ID NO: 8401 - protein, 6 aa, ARTIFICIAL SEQUENCE
  Synthetic Construct
AKQGRK

SEQ ID NO: 8402 - protein, 6 aa, ARTIFICIAL SEQUENCE
  Synthetic Construct
AKQGSK

SEQ ID NO: 8403 - protein, 6 aa, ARTIFICIAL SEQUENCE
  Synthetic Construct
AKQGTK

SEQ ID NO: 8404 - protein, 6 aa, ARTIFICIAL SEQUENCE
  Synthetic Construct
AKQGYK

SEQ ID NO: 8405 - protein, 6 aa, ARTIFICIAL SEQUENCE
  Synthetic Construct
AKQHAK

SEQ ID NO: 8406 - protein, 6 aa, ARTIFICIAL SEQUENCE
  Synthetic Construct
AKQHDK

SEQ ID NO: 8407 - protein, 6 aa, ARTIFICIAL SEQUENCE
  Synthetic Construct
AKQHEK

SEQ ID NO: 8408 - protein, 6 aa, ARTIFICIAL SEQUENCE
  Synthetic Construct
AKQHFK

SEQ ID NO: 8409 - protein, 6 aa, ARTIFICIAL SEQUENCE
  Synthetic Construct
AKQHGK

SEQ ID NO: 8410 - protein, 6 aa, ARTIFICIAL SEQUENCE
  Synthetic Construct
AKQHHK

SEQ ID NO: 8411 - protein, 6 aa, ARTIFICIAL SEQUENCE
  Synthetic Construct
AKQHIK

SEQ ID NO: 8412 - protein, 6 aa, ARTIFICIAL SEQUENCE
  Synthetic Construct
AKQHLK

SEQ ID NO: 8413 - protein, 6 aa, ARTIFICIAL SEQUENCE
  Synthetic Construct
AKQHNK

SEQ ID NO: 8414 - protein, 6 aa, ARTIFICIAL SEQUENCE
  Synthetic Construct
AKQHQK

SEQ ID NO: 8415 - protein, 6 aa, ARTIFICIAL SEQUENCE
  Synthetic Construct
AKQHRK

SEQ ID NO: 8416 - protein, 6 aa, ARTIFICIAL SEQUENCE
  Synthetic Construct
AKQHSK

SEQ ID NO: 8417 - protein, 6 aa, ARTIFICIAL SEQUENCE
  Synthetic Construct
AKQHTK

SEQ ID NO: 8418 - protein, 6 aa, ARTIFICIAL SEQUENCE
  Synthetic Construct
AKQHYK

SEQ ID NO: 8419 - protein, 6 aa, ARTIFICIAL SEQUENCE
  Synthetic Construct
AKQIAK

SEQ ID NO: 8420 - protein, 6 aa, ARTIFICIAL SEQUENCE
  Synthetic Construct
AKQIDK

SEQ ID NO: 8421 - protein, 6 aa, ARTIFICIAL SEQUENCE
  Synthetic Construct
AKQIEK

SEQ ID NO: 8422 - protein, 6 aa, ARTIFICIAL SEQUENCE
  Synthetic Construct
AKQIFK

SEQ ID NO: 8423 - protein, 6 aa, ARTIFICIAL SEQUENCE
  Synthetic Construct
AKQIGK

SEQ ID NO: 8424 - protein, 6 aa, ARTIFICIAL SEQUENCE
  Synthetic Construct
AKQIHK

SEQ ID NO: 8425 - protein, 6 aa, ARTIFICIAL SEQUENCE
  Synthetic Construct
AKQIIK

SEQ ID NO: 8426 - protein, 6 aa, ARTIFICIAL SEQUENCE
  Synthetic Construct
AKQILK

SEQ ID NO: 8427 - protein, 6 aa, ARTIFICIAL SEQUENCE
  Synthetic Construct
AKQINK

SEQ ID NO: 8428 - protein, 6 aa, ARTIFICIAL SEQUENCE
  Synthetic Construct
AKQIQK

SEQ ID NO: 8429 - protein, 6 aa, ARTIFICIAL SEQUENCE
  Synthetic Construct
AKQIRK

SEQ ID NO: 8430 - protein, 6 aa, ARTIFICIAL SEQUENCE
  Synthetic Construct
AKQISK

SEQ ID NO: 8431 - protein, 6 aa, ARTIFICIAL SEQUENCE
  Synthetic Construct
AKQITK

SEQ ID NO: 8432 - protein, 6 aa, ARTIFICIAL SEQUENCE
  Synthetic Construct
AKQIYK

SEQ ID NO: 8433 - protein, 6 aa, ARTIFICIAL SEQUENCE
  Synthetic Construct
AKQLAK

SEQ ID NO: 8434 - protein, 6 aa, ARTIFICIAL SEQUENCE
  Synthetic Construct
AKQLDK

SEQ ID NO: 8435 - protein, 6 aa, ARTIFICIAL SEQUENCE
  Synthetic Construct
AKQLEK

SEQ ID NO: 8436 - protein, 6 aa, ARTIFICIAL SEQUENCE
  Synthetic Construct
AKQLFK

SEQ ID NO: 8437 - protein, 6 aa, ARTIFICIAL SEQUENCE
  Synthetic Construct
AKQLGK

SEQ ID NO: 8438 - protein, 6 aa, ARTIFICIAL SEQUENCE
  Synthetic Construct
AKQLHK

SEQ ID NO: 8439 - protein, 6 aa, ARTIFICIAL SEQUENCE
  Synthetic Construct
AKQLIK

SEQ ID NO: 8440 - protein, 6 aa, ARTIFICIAL SEQUENCE
  Synthetic Construct
AKQLLK

SEQ ID NO: 8441 - protein, 6 aa, ARTIFICIAL SEQUENCE
  Synthetic Construct
AKQLNK

SEQ ID NO: 8442 - protein, 6 aa, ARTIFICIAL SEQUENCE
  Synthetic Construct
AKQLQK

SEQ ID NO: 8443 - protein, 6 aa, ARTIFICIAL SEQUENCE
  Synthetic Construct
AKQLRK

SEQ ID NO: 8444 - protein, 6 aa, ARTIFICIAL SEQUENCE
  Synthetic Construct
AKQLSK

SEQ ID NO: 8445 - protein, 6 aa, ARTIFICIAL SEQUENCE
  Synthetic Construct
AKQLTK

SEQ ID NO: 8446 - protein, 6 aa, ARTIFICIAL SEQUENCE
  Synthetic Construct
AKQLYK

SEQ ID NO: 8447 - protein, 6 aa, ARTIFICIAL SEQUENCE
  Synthetic Construct
AKQNAK

SEQ ID NO: 8448 - protein, 6 aa, ARTIFICIAL SEQUENCE
  Synthetic Construct
AKQNDK

SEQ ID NO: 8449 - protein, 6 aa, ARTIFICIAL SEQUENCE
  Synthetic Construct
AKQNEK

SEQ ID NO: 8450 - protein, 6 aa, ARTIFICIAL SEQUENCE
  Synthetic Construct
AKQNFK

SEQ ID NO: 8451 - protein, 6 aa, ARTIFICIAL SEQUENCE
  Synthetic Construct
AKQNGK

SEQ ID NO: 8452 - protein, 6 aa, ARTIFICIAL SEQUENCE
  Synthetic Construct
AKQNHK

SEQ ID NO: 8453 - protein, 6 aa, ARTIFICIAL SEQUENCE
  Synthetic Construct
AKQNIK

SEQ ID NO: 8454 - protein, 6 aa, ARTIFICIAL SEQUENCE
  Synthetic Construct
AKQNLK

SEQ ID NO: 8455 - protein, 6 aa, ARTIFICIAL SEQUENCE
  Synthetic Construct
AKQNNK

SEQ ID NO: 8456 - protein, 6 aa, ARTIFICIAL SEQUENCE
  Synthetic Construct
AKQNQK

SEQ ID NO: 8457 - protein, 6 aa, ARTIFICIAL SEQUENCE
  Synthetic Construct
AKQNRK

SEQ ID NO: 8458 - protein, 6 aa, ARTIFICIAL SEQUENCE
  Synthetic Construct
AKQNSK

SEQ ID NO: 8459 - protein, 6 aa, ARTIFICIAL SEQUENCE
  Synthetic Construct
AKQNTK

SEQ ID NO: 8460 - protein, 6 aa, ARTIFICIAL SEQUENCE
  Synthetic Construct
AKQNYK

SEQ ID NO: 8461 - protein, 6 aa, ARTIFICIAL SEQUENCE
  Synthetic Construct
AKQQAK

SEQ ID NO: 8462 - protein, 6 aa, ARTIFICIAL SEQUENCE
  Synthetic Construct
AKQQDK

SEQ ID NO: 8463 - protein, 6 aa, ARTIFICIAL SEQUENCE
  Synthetic Construct
AKQQEK

SEQ ID NO: 8464 - protein, 6 aa, ARTIFICIAL SEQUENCE
  Synthetic Construct
AKQQFK

SEQ ID NO: 8465 - protein, 6 aa, ARTIFICIAL SEQUENCE
  Synthetic Construct
AKQQGK

SEQ ID NO: 8466 - protein, 6 aa, ARTIFICIAL SEQUENCE
  Synthetic Construct
AKQQHK

SEQ ID NO: 8467 - protein, 6 aa, ARTIFICIAL SEQUENCE
  Synthetic Construct
AKQQIK

SEQ ID NO: 8468 - protein, 6 aa, ARTIFICIAL SEQUENCE
  Synthetic Construct
AKQQLK

SEQ ID NO: 8469 - protein, 6 aa, ARTIFICIAL SEQUENCE
  Synthetic Construct
AKQQNK

SEQ ID NO: 8470 - protein, 6 aa, ARTIFICIAL SEQUENCE
  Synthetic Construct
AKQQQK

SEQ ID NO: 8471 - protein, 6 aa, ARTIFICIAL SEQUENCE
  Synthetic Construct
AKQQRK

SEQ ID NO: 8472 - protein, 6 aa, ARTIFICIAL SEQUENCE
  Synthetic Construct
AKQQSK

SEQ ID NO: 8473 - protein, 6 aa, ARTIFICIAL SEQUENCE
  Synthetic Construct
AKQQTK

SEQ ID NO: 8474 - protein, 6 aa, ARTIFICIAL SEQUENCE
  Synthetic Construct
AKQQYK

SEQ ID NO: 8475 - protein, 6 aa, ARTIFICIAL SEQUENCE
  Synthetic Construct
AKQRAK

SEQ ID NO: 8476 - protein, 6 aa, ARTIFICIAL SEQUENCE
  Synthetic Construct
AKQRDK

SEQ ID NO: 8477 - protein, 6 aa, ARTIFICIAL SEQUENCE
  Synthetic Construct
AKQREK

SEQ ID NO: 8478 - protein, 6 aa, ARTIFICIAL SEQUENCE
  Synthetic Construct
AKQRFK

SEQ ID NO: 8479 - protein, 6 aa, ARTIFICIAL SEQUENCE
  Synthetic Construct
AKQRGK

SEQ ID NO: 8480 - protein, 6 aa, ARTIFICIAL SEQUENCE
  Synthetic Construct
AKQRHK

SEQ ID NO: 8481 - protein, 6 aa, ARTIFICIAL SEQUENCE
  Synthetic Construct
AKQRIK

SEQ ID NO: 8482 - protein, 6 aa, ARTIFICIAL SEQUENCE
  Synthetic Construct
AKQRLK

SEQ ID NO: 8483 - protein, 6 aa, ARTIFICIAL SEQUENCE
  Synthetic Construct
AKQRNK

SEQ ID NO: 8484 - protein, 6 aa, ARTIFICIAL SEQUENCE
  Synthetic Construct
AKQRQK

SEQ ID NO: 8485 - protein, 6 aa, ARTIFICIAL SEQUENCE
  Synthetic Construct
AKQRRK

SEQ ID NO: 8486 - protein, 6 aa, ARTIFICIAL SEQUENCE
  Synthetic Construct
AKQRSK

SEQ ID NO: 8487 - protein, 6 aa, ARTIFICIAL SEQUENCE
  Synthetic Construct
AKQRTK

SEQ ID NO: 8488 - protein, 6 aa, ARTIFICIAL SEQUENCE
  Synthetic Construct
AKQRYK

SEQ ID NO: 8489 - protein, 6 aa, ARTIFICIAL SEQUENCE
  Synthetic Construct
AKQSAK

SEQ ID NO: 8490 - protein, 6 aa, ARTIFICIAL SEQUENCE
  Synthetic Construct
AKQSDK

SEQ ID NO: 8491 - protein, 6 aa, ARTIFICIAL SEQUENCE
  Synthetic Construct
AKQSEK

SEQ ID NO: 8492 - protein, 6 aa, ARTIFICIAL SEQUENCE
  Synthetic Construct
AKQSFK

SEQ ID NO: 8493 - protein, 6 aa, ARTIFICIAL SEQUENCE
  Synthetic Construct
AKQSGK

SEQ ID NO: 8494 - protein, 6 aa, ARTIFICIAL SEQUENCE
  Synthetic Construct
AKQSHK

SEQ ID NO: 8495 - protein, 6 aa, ARTIFICIAL SEQUENCE
  Synthetic Construct
AKQSIK

SEQ ID NO: 8496 - protein, 6 aa, ARTIFICIAL SEQUENCE
  Synthetic Construct
AKQSLK

SEQ ID NO: 8497 - protein, 6 aa, ARTIFICIAL SEQUENCE
  Synthetic Construct
AKQSNK

SEQ ID NO: 8498 - protein, 6 aa, ARTIFICIAL SEQUENCE
  Synthetic Construct
AKQSQK

SEQ ID NO: 8499 - protein, 6 aa, ARTIFICIAL SEQUENCE
  Synthetic Construct
AKQSRK

SEQ ID NO: 8500 - protein, 6 aa, ARTIFICIAL SEQUENCE
  Synthetic Construct
AKQSSK

SEQ ID NO: 8501 - protein, 6 aa, ARTIFICIAL SEQUENCE
  Synthetic Construct
AKQSTK

SEQ ID NO: 8502 - protein, 6 aa, ARTIFICIAL SEQUENCE
  Synthetic Construct
AKQSYK

SEQ ID NO: 8503 - protein, 6 aa, ARTIFICIAL SEQUENCE
  Synthetic Construct
AKQTAK

SEQ ID NO: 8504 - protein, 6 aa, ARTIFICIAL SEQUENCE
  Synthetic Construct
AKQTDK

SEQ ID NO: 8505 - protein, 6 aa, ARTIFICIAL SEQUENCE
  Synthetic Construct
AKQTEK

SEQ ID NO: 8506 - protein, 6 aa, ARTIFICIAL SEQUENCE
  Synthetic Construct
AKQTFK

SEQ ID NO: 8507 - protein, 6 aa, ARTIFICIAL SEQUENCE
  Synthetic Construct
AKQTGK

SEQ ID NO: 8508 - protein, 6 aa, ARTIFICIAL SEQUENCE
  Synthetic Construct
AKQTHK

SEQ ID NO: 8509 - protein, 6 aa, ARTIFICIAL SEQUENCE
  Synthetic Construct
AKQTIK

SEQ ID NO: 8510 - protein, 6 aa, ARTIFICIAL SEQUENCE
  Synthetic Construct
AKQTLK

SEQ ID NO: 8511 - protein, 6 aa, ARTIFICIAL SEQUENCE
  Synthetic Construct
AKQTNK

SEQ ID NO: 8512 - protein, 6 aa, ARTIFICIAL SEQUENCE
  Synthetic Construct
AKQTQK

SEQ ID NO: 8513 - protein, 6 aa, ARTIFICIAL SEQUENCE
  Synthetic Construct
AKQTRK

SEQ ID NO: 8514 - protein, 6 aa, ARTIFICIAL SEQUENCE
  Synthetic Construct
AKQTSK

SEQ ID NO: 8515 - protein, 6 aa, ARTIFICIAL SEQUENCE
  Synthetic Construct
AKQTTK

SEQ ID NO: 8516 - protein, 6 aa, ARTIFICIAL SEQUENCE
  Synthetic Construct
AKQTYK

SEQ ID NO: 8517 - protein, 6 aa, ARTIFICIAL SEQUENCE
  Synthetic Construct
AKQYAK

SEQ ID NO: 8518 - protein, 6 aa, ARTIFICIAL SEQUENCE
  Synthetic Construct
AKQYDK

SEQ ID NO: 8519 - protein, 6 aa, ARTIFICIAL SEQUENCE
  Synthetic Construct
AKQYEK

SEQ ID NO: 8520 - protein, 6 aa, ARTIFICIAL SEQUENCE
  Synthetic Construct
AKQYFK

SEQ ID NO: 8521 - protein, 6 aa, ARTIFICIAL SEQUENCE
  Synthetic Construct
AKQYGK

SEQ ID NO: 8522 - protein, 6 aa, ARTIFICIAL SEQUENCE
  Synthetic Construct
AKQYHK

SEQ ID NO: 8523 - protein, 6 aa, ARTIFICIAL SEQUENCE
  Synthetic Construct
AKQYIK

SEQ ID NO: 8524 - protein, 6 aa, ARTIFICIAL SEQUENCE
  Synthetic Construct
AKQYLK

SEQ ID NO: 8525 - protein, 6 aa, ARTIFICIAL SEQUENCE
  Synthetic Construct
AKQYNK

SEQ ID NO: 8526 - protein, 6 aa, ARTIFICIAL SEQUENCE
  Synthetic Construct
AKQYQK

SEQ ID NO: 8527 - protein, 6 aa, ARTIFICIAL SEQUENCE
  Synthetic Construct
AKQYRK

SEQ ID NO: 8528 - protein, 6 aa, ARTIFICIAL SEQUENCE
  Synthetic Construct
AKQYSK

SEQ ID NO: 8529 - protein, 6 aa, ARTIFICIAL SEQUENCE
  Synthetic Construct
AKQYTK

SEQ ID NO: 8530 - protein, 6 aa, ARTIFICIAL SEQUENCE
  Synthetic Construct
AKQYYK

SEQ ID NO: 8531 - protein, 6 aa, ARTIFICIAL SEQUENCE
  Synthetic Construct
AKRAAK

SEQ ID NO: 8532 - protein, 6 aa, ARTIFICIAL SEQUENCE
  Synthetic Construct
AKRADK

SEQ ID NO: 8533 - protein, 6 aa, ARTIFICIAL SEQUENCE
  Synthetic Construct
AKRAEK

SEQ ID NO: 8534 - protein, 6 aa, ARTIFICIAL SEQUENCE
  Synthetic Construct
AKRAFK

SEQ ID NO: 8535 - protein, 6 aa, ARTIFICIAL SEQUENCE
  Synthetic Construct
AKRAGK

SEQ ID NO: 8536 - protein, 6 aa, ARTIFICIAL SEQUENCE
  Synthetic Construct
AKRAHK

SEQ ID NO: 8537 - protein, 6 aa, ARTIFICIAL SEQUENCE
  Synthetic Construct
AKRAIK

SEQ ID NO: 8538 - protein, 6 aa, ARTIFICIAL SEQUENCE
  Synthetic Construct
AKRALK

SEQ ID NO: 8539 - protein, 6 aa, ARTIFICIAL SEQUENCE
  Synthetic Construct
AKRANK

SEQ ID NO: 8540 - protein, 6 aa, ARTIFICIAL SEQUENCE
  Synthetic Construct
AKRAQK

SEQ ID NO: 8541 - protein, 6 aa, ARTIFICIAL SEQUENCE
  Synthetic Construct
AKRARK

SEQ ID NO: 8542 - protein, 6 aa, ARTIFICIAL SEQUENCE
  Synthetic Construct
AKRASK

SEQ ID NO: 8543 - protein, 6 aa, ARTIFICIAL SEQUENCE
  Synthetic Construct
AKRATK

SEQ ID NO: 8544 - protein, 6 aa, ARTIFICIAL SEQUENCE
  Synthetic Construct
AKRAYK

SEQ ID NO: 8545 - protein, 6 aa, ARTIFICIAL SEQUENCE
  Synthetic Construct
AKRDAK

SEQ ID NO: 8546 - protein, 6 aa, ARTIFICIAL SEQUENCE
  Synthetic Construct
AKRDDK

SEQ ID NO: 8547 - protein, 6 aa, ARTIFICIAL SEQUENCE
  Synthetic Construct
AKRDEK

SEQ ID NO: 8548 - protein, 6 aa, ARTIFICIAL SEQUENCE
  Synthetic Construct
AKRDFK

SEQ ID NO: 8549 - protein, 6 aa, ARTIFICIAL SEQUENCE
  Synthetic Construct
AKRDGK

SEQ ID NO: 8550 - protein, 6 aa, ARTIFICIAL SEQUENCE
  Synthetic Construct
AKRDHK

SEQ ID NO: 8551 - protein, 6 aa, ARTIFICIAL SEQUENCE
  Synthetic Construct
AKRDIK

SEQ ID NO: 8552 - protein, 6 aa, ARTIFICIAL SEQUENCE
  Synthetic Construct
AKRDLK

SEQ ID NO: 8553 - protein, 6 aa, ARTIFICIAL SEQUENCE
  Synthetic Construct
AKRDNK

SEQ ID NO: 8554 - protein, 6 aa, ARTIFICIAL SEQUENCE
  Synthetic Construct
AKRDQK

SEQ ID NO: 8555 - protein, 6 aa, ARTIFICIAL SEQUENCE
  Synthetic Construct
AKRDRK

SEQ ID NO: 8556 - protein, 6 aa, ARTIFICIAL SEQUENCE
  Synthetic Construct
AKRDSK

SEQ ID NO: 8557 - protein, 6 aa, ARTIFICIAL SEQUENCE
  Synthetic Construct
AKRDTK

SEQ ID NO: 8558 - protein, 6 aa, ARTIFICIAL SEQUENCE
  Synthetic Construct
AKRDYK

SEQ ID NO: 8559 - protein, 6 aa, ARTIFICIAL SEQUENCE
  Synthetic Construct
AKREAK

SEQ ID NO: 8560 - protein, 6 aa, ARTIFICIAL SEQUENCE
  Synthetic Construct
AKREDK

SEQ ID NO: 8561 - protein, 6 aa, ARTIFICIAL SEQUENCE
  Synthetic Construct
AKREEK

SEQ ID NO: 8562 - protein, 6 aa, ARTIFICIAL SEQUENCE
  Synthetic Construct
AKREFK

SEQ ID NO: 8563 - protein, 6 aa, ARTIFICIAL SEQUENCE
  Synthetic Construct
AKREGK

SEQ ID NO: 8564 - protein, 6 aa, ARTIFICIAL SEQUENCE
  Synthetic Construct
AKREHK

SEQ ID NO: 8565 - protein, 6 aa, ARTIFICIAL SEQUENCE
  Synthetic Construct
AKREIK

SEQ ID NO: 8566 - protein, 6 aa, ARTIFICIAL SEQUENCE
  Synthetic Construct
AKRELK

SEQ ID NO: 8567 - protein, 6 aa, ARTIFICIAL SEQUENCE
  Synthetic Construct
AKRENK

SEQ ID NO: 8568 - protein, 6 aa, ARTIFICIAL SEQUENCE
  Synthetic Construct
AKREQK

SEQ ID NO: 8569 - protein, 6 aa, ARTIFICIAL SEQUENCE
  Synthetic Construct
AKRERK

SEQ ID NO: 8570 - protein, 6 aa, ARTIFICIAL SEQUENCE
  Synthetic Construct
AKRESK

SEQ ID NO: 8571 - protein, 6 aa, ARTIFICIAL SEQUENCE
  Synthetic Construct
AKRETK

SEQ ID NO: 8572 - protein, 6 aa, ARTIFICIAL SEQUENCE
  Synthetic Construct
AKREYK

SEQ ID NO: 8573 - protein, 6 aa, ARTIFICIAL SEQUENCE
  Synthetic Construct
AKRFAK

SEQ ID NO: 8574 - protein, 6 aa, ARTIFICIAL SEQUENCE
  Synthetic Construct
AKRFDK

SEQ ID NO: 8575 - protein, 6 aa, ARTIFICIAL SEQUENCE
  Synthetic Construct
AKRFEK

SEQ ID NO: 8576 - protein, 6 aa, ARTIFICIAL SEQUENCE
  Synthetic Construct
AKRFFK

SEQ ID NO: 8577 - protein, 6 aa, ARTIFICIAL SEQUENCE
  Synthetic Construct
AKRFGK

SEQ ID NO: 8578 - protein, 6 aa, ARTIFICIAL SEQUENCE
  Synthetic Construct
AKRFHK

SEQ ID NO: 8579 - protein, 6 aa, ARTIFICIAL SEQUENCE
  Synthetic Construct
AKRFIK

SEQ ID NO: 8580 - protein, 6 aa, ARTIFICIAL SEQUENCE
  Synthetic Construct
AKRFLK

SEQ ID NO: 8581 - protein, 6 aa, ARTIFICIAL SEQUENCE
  Synthetic Construct
AKRFNK

SEQ ID NO: 8582 - protein, 6 aa, ARTIFICIAL SEQUENCE
  Synthetic Construct
AKRFQK

SEQ ID NO: 8583 - protein, 6 aa, ARTIFICIAL SEQUENCE
  Synthetic Construct
AKRFRK

SEQ ID NO: 8584 - protein, 6 aa, ARTIFICIAL SEQUENCE
  Synthetic Construct
AKRFSK

SEQ ID NO: 8585 - protein, 6 aa, ARTIFICIAL SEQUENCE
  Synthetic Construct
AKRFTK

SEQ ID NO: 8586 - protein, 6 aa, ARTIFICIAL SEQUENCE
  Synthetic Construct
AKRFYK

SEQ ID NO: 8587 - protein, 6 aa, ARTIFICIAL SEQUENCE
  Synthetic Construct
AKRGAK

SEQ ID NO: 8588 - protein, 6 aa, ARTIFICIAL SEQUENCE
  Synthetic Construct
AKRGDK

SEQ ID NO: 8589 - protein, 6 aa, ARTIFICIAL SEQUENCE
  Synthetic Construct
AKRGEK

SEQ ID NO: 8590 - protein, 6 aa, ARTIFICIAL SEQUENCE
  Synthetic Construct
AKRGFK

SEQ ID NO: 8591 - protein, 6 aa, ARTIFICIAL SEQUENCE
  Synthetic Construct
AKRGGK

SEQ ID NO: 8592 - protein, 6 aa, ARTIFICIAL SEQUENCE
  Synthetic Construct
AKRGHK

SEQ ID NO: 8593 - protein, 6 aa, ARTIFICIAL SEQUENCE
  Synthetic Construct
AKRGIK

SEQ ID NO: 8594 - protein, 6 aa, ARTIFICIAL SEQUENCE
  Synthetic Construct
AKRGLK

SEQ ID NO: 8595 - protein, 6 aa, ARTIFICIAL SEQUENCE
  Synthetic Construct
AKRGNK

SEQ ID NO: 8596 - protein, 6 aa, ARTIFICIAL SEQUENCE
  Synthetic Construct
AKRGQK

SEQ ID NO: 8597 - protein, 6 aa, ARTIFICIAL SEQUENCE
  Synthetic Construct
AKRGRK

SEQ ID NO: 8598 - protein, 6 aa, ARTIFICIAL SEQUENCE
  Synthetic Construct
AKRGSK

SEQ ID NO: 8599 - protein, 6 aa, ARTIFICIAL SEQUENCE
  Synthetic Construct
AKRGTK

SEQ ID NO: 8600 - protein, 6 aa, ARTIFICIAL SEQUENCE
  Synthetic Construct
AKRGYK

SEQ ID NO: 8601 - protein, 6 aa, ARTIFICIAL SEQUENCE
  Synthetic Construct
AKRHAK

SEQ ID NO: 8602 - protein, 6 aa, ARTIFICIAL SEQUENCE
  Synthetic Construct
AKRHDK

SEQ ID NO: 8603 - protein, 6 aa, ARTIFICIAL SEQUENCE
  Synthetic Construct
AKRHEK

SEQ ID NO: 8604 - protein, 6 aa, ARTIFICIAL SEQUENCE
  Synthetic Construct
AKRHFK

SEQ ID NO: 8605 - protein, 6 aa, ARTIFICIAL SEQUENCE
  Synthetic Construct
AKRHGK

SEQ ID NO: 8606 - protein, 6 aa, ARTIFICIAL SEQUENCE
  Synthetic Construct
AKRHHK

SEQ ID NO: 8607 - protein, 6 aa, ARTIFICIAL SEQUENCE
  Synthetic Construct
AKRHIK

SEQ ID NO: 8608 - protein, 6 aa, ARTIFICIAL SEQUENCE
  Synthetic Construct
AKRHLK

SEQ ID NO: 8609 - protein, 6 aa, ARTIFICIAL SEQUENCE
  Synthetic Construct
AKRHNK

SEQ ID NO: 8610 - protein, 6 aa, ARTIFICIAL SEQUENCE
  Synthetic Construct
AKRHQK

SEQ ID NO: 8611 - protein, 6 aa, ARTIFICIAL SEQUENCE
  Synthetic Construct
AKRHRK

SEQ ID NO: 8612 - protein, 6 aa, ARTIFICIAL SEQUENCE
  Synthetic Construct
AKRHSK

SEQ ID NO: 8613 - protein, 6 aa, ARTIFICIAL SEQUENCE
  Synthetic Construct
AKRHTK

SEQ ID NO: 8614 - protein, 6 aa, ARTIFICIAL SEQUENCE
  Synthetic Construct
AKRHYK

SEQ ID NO: 8615 - protein, 6 aa, ARTIFICIAL SEQUENCE
  Synthetic Construct
AKRIAK

SEQ ID NO: 8616 - protein, 6 aa, ARTIFICIAL SEQUENCE
  Synthetic Construct
AKRIDK

SEQ ID NO: 8617 - protein, 6 aa, ARTIFICIAL SEQUENCE
  Synthetic Construct
AKRIEK

SEQ ID NO: 8618 - protein, 6 aa, ARTIFICIAL SEQUENCE
  Synthetic Construct
AKRIFK

SEQ ID NO: 8619 - protein, 6 aa, ARTIFICIAL SEQUENCE
  Synthetic Construct
AKRIGK

SEQ ID NO: 8620 - protein, 6 aa, ARTIFICIAL SEQUENCE
  Synthetic Construct
AKRIHK

SEQ ID NO: 8621 - protein, 6 aa, ARTIFICIAL SEQUENCE
  Synthetic Construct
AKRIIK

SEQ ID NO: 8622 - protein, 6 aa, ARTIFICIAL SEQUENCE
  Synthetic Construct
AKRILK

SEQ ID NO: 8623 - protein, 6 aa, ARTIFICIAL SEQUENCE
  Synthetic Construct
AKRINK

SEQ ID NO: 8624 - protein, 6 aa, ARTIFICIAL SEQUENCE
  Synthetic Construct
AKRIQK

SEQ ID NO: 8625 - protein, 6 aa, ARTIFICIAL SEQUENCE
  Synthetic Construct
AKRIRK

SEQ ID NO: 8626 - protein, 6 aa, ARTIFICIAL SEQUENCE
  Synthetic Construct
AKRISK

SEQ ID NO: 8627 - protein, 6 aa, ARTIFICIAL SEQUENCE
  Synthetic Construct
AKRITK

SEQ ID NO: 8628 - protein, 6 aa, ARTIFICIAL SEQUENCE
  Synthetic Construct
AKRIYK

SEQ ID NO: 8629 - protein, 6 aa, ARTIFICIAL SEQUENCE
  Synthetic Construct
AKRLAK

SEQ ID NO: 8630 - protein, 6 aa, ARTIFICIAL SEQUENCE
  Synthetic Construct
AKRLDK

SEQ ID NO: 8631 - protein, 6 aa, ARTIFICIAL SEQUENCE
  Synthetic Construct
AKRLEK

SEQ ID NO: 8632 - protein, 6 aa, ARTIFICIAL SEQUENCE
  Synthetic Construct
AKRLFK

SEQ ID NO: 8633 - protein, 6 aa, ARTIFICIAL SEQUENCE
  Synthetic Construct
AKRLGK

SEQ ID NO: 8634 - protein, 6 aa, ARTIFICIAL SEQUENCE
  Synthetic Construct
AKRLHK

SEQ ID NO: 8635 - protein, 6 aa, ARTIFICIAL SEQUENCE
  Synthetic Construct
AKRLIK

SEQ ID NO: 8636 - protein, 6 aa, ARTIFICIAL SEQUENCE
  Synthetic Construct
AKRLLK

SEQ ID NO: 8637 - protein, 6 aa, ARTIFICIAL SEQUENCE
  Synthetic Construct
AKRLNK

SEQ ID NO: 8638 - protein, 6 aa, ARTIFICIAL SEQUENCE
  Synthetic Construct
AKRLQK

SEQ ID NO: 8639 - protein, 6 aa, ARTIFICIAL SEQUENCE
  Synthetic Construct
AKRLRK

SEQ ID NO: 8640 - protein, 6 aa, ARTIFICIAL SEQUENCE
  Synthetic Construct
AKRLSK

SEQ ID NO: 8641 - protein, 6 aa, ARTIFICIAL SEQUENCE
  Synthetic Construct
AKRLTK

SEQ ID NO: 8642 - protein, 6 aa, ARTIFICIAL SEQUENCE
  Synthetic Construct
AKRLYK

SEQ ID NO: 8643 - protein, 6 aa, ARTIFICIAL SEQUENCE
  Synthetic Construct
AKRNAK

SEQ ID NO: 8644 - protein, 6 aa, ARTIFICIAL SEQUENCE
  Synthetic Construct
AKRNDK

SEQ ID NO: 8645 - protein, 6 aa, ARTIFICIAL SEQUENCE
  Synthetic Construct
AKRNEK

SEQ ID NO: 8646 - protein, 6 aa, ARTIFICIAL SEQUENCE
  Synthetic Construct
AKRNFK

SEQ ID NO: 8647 - protein, 6 aa, ARTIFICIAL SEQUENCE
  Synthetic Construct
AKRNGK

SEQ ID NO: 8648 - protein, 6 aa, ARTIFICIAL SEQUENCE
  Synthetic Construct
AKRNHK

SEQ ID NO: 8649 - protein, 6 aa, ARTIFICIAL SEQUENCE
  Synthetic Construct
AKRNIK

SEQ ID NO: 8650 - protein, 6 aa, ARTIFICIAL SEQUENCE
  Synthetic Construct
AKRNLK

SEQ ID NO: 8651 - protein, 6 aa, ARTIFICIAL SEQUENCE
  Synthetic Construct
AKRNNK

SEQ ID NO: 8652 - protein, 6 aa, ARTIFICIAL SEQUENCE
  Synthetic Construct
AKRNQK

SEQ ID NO: 8653 - protein, 6 aa, ARTIFICIAL SEQUENCE
  Synthetic Construct
AKRNRK

SEQ ID NO: 8654 - protein, 6 aa, ARTIFICIAL SEQUENCE
  Synthetic Construct
AKRNSK

SEQ ID NO: 8655 - protein, 6 aa, ARTIFICIAL SEQUENCE
  Synthetic Construct
AKRNTK

SEQ ID NO: 8656 - protein, 6 aa, ARTIFICIAL SEQUENCE
  Synthetic Construct
AKRNYK

SEQ ID NO: 8657 - protein, 6 aa, ARTIFICIAL SEQUENCE
  Synthetic Construct
AKRQAK

SEQ ID NO: 8658 - protein, 6 aa, ARTIFICIAL SEQUENCE
  Synthetic Construct
AKRQDK

SEQ ID NO: 8659 - protein, 6 aa, ARTIFICIAL SEQUENCE
  Synthetic Construct
AKRQEK

SEQ ID NO: 8660 - protein, 6 aa, ARTIFICIAL SEQUENCE
  Synthetic Construct
AKRQFK

SEQ ID NO: 8661 - protein, 6 aa, ARTIFICIAL SEQUENCE
  Synthetic Construct
AKRQGK

SEQ ID NO: 8662 - protein, 6 aa, ARTIFICIAL SEQUENCE
  Synthetic Construct
AKRQHK

SEQ ID NO: 8663 - protein, 6 aa, ARTIFICIAL SEQUENCE
  Synthetic Construct
AKRQIK

SEQ ID NO: 8664 - protein, 6 aa, ARTIFICIAL SEQUENCE
  Synthetic Construct
AKRQLK

SEQ ID NO: 8665 - protein, 6 aa, ARTIFICIAL SEQUENCE
  Synthetic Construct
AKRQNK

SEQ ID NO: 8666 - protein, 6 aa, ARTIFICIAL SEQUENCE
  Synthetic Construct
AKRQQK

SEQ ID NO: 8667 - protein, 6 aa, ARTIFICIAL SEQUENCE
  Synthetic Construct
AKRQRK

SEQ ID NO: 8668 - protein, 6 aa, ARTIFICIAL SEQUENCE
  Synthetic Construct
AKRQSK

SEQ ID NO: 8669 - protein, 6 aa, ARTIFICIAL SEQUENCE
  Synthetic Construct
AKRQTK

SEQ ID NO: 8670 - protein, 6 aa, ARTIFICIAL SEQUENCE
  Synthetic Construct
AKRQYK

SEQ ID NO: 8671 - protein, 6 aa, ARTIFICIAL SEQUENCE
  Synthetic Construct
AKRRAK

SEQ ID NO: 8672 - protein, 6 aa, ARTIFICIAL SEQUENCE
  Synthetic Construct
AKRRDK

SEQ ID NO: 8673 - protein, 6 aa, ARTIFICIAL SEQUENCE
  Synthetic Construct
AKRREK

SEQ ID NO: 8674 - protein, 6 aa, ARTIFICIAL SEQUENCE
  Synthetic Construct
AKRRFK

SEQ ID NO: 8675 - protein, 6 aa, ARTIFICIAL SEQUENCE
  Synthetic Construct
AKRRGK

SEQ ID NO: 8676 - protein, 6 aa, ARTIFICIAL SEQUENCE
  Synthetic Construct
AKRRHK

SEQ ID NO: 8677 - protein, 6 aa, ARTIFICIAL SEQUENCE
  Synthetic Construct
AKRRIK

SEQ ID NO: 8678 - protein, 6 aa, ARTIFICIAL SEQUENCE
  Synthetic Construct
AKRRLK

SEQ ID NO: 8679 - protein, 6 aa, ARTIFICIAL SEQUENCE
  Synthetic Construct
AKRRNK

SEQ ID NO: 8680 - protein, 6 aa, ARTIFICIAL SEQUENCE
  Synthetic Construct
AKRRQK

SEQ ID NO: 8681 - protein, 6 aa, ARTIFICIAL SEQUENCE
  Synthetic Construct
AKRRRK

SEQ ID NO: 8682 - protein, 6 aa, ARTIFICIAL SEQUENCE
  Synthetic Construct
AKRRSK

SEQ ID NO: 8683 - protein, 6 aa, ARTIFICIAL SEQUENCE
  Synthetic Construct
AKRRTK

SEQ ID NO: 8684 - protein, 6 aa, ARTIFICIAL SEQUENCE
  Synthetic Construct
AKRRYK

SEQ ID NO: 8685 - protein, 6 aa, ARTIFICIAL SEQUENCE
  Synthetic Construct
AKRSAK

SEQ ID NO: 8686 - protein, 6 aa, ARTIFICIAL SEQUENCE
  Synthetic Construct
AKRSDK

SEQ ID NO: 8687 - protein, 6 aa, ARTIFICIAL SEQUENCE
  Synthetic Construct
AKRSEK

SEQ ID NO: 8688 - protein, 6 aa, ARTIFICIAL SEQUENCE
  Synthetic Construct
AKRSFK

SEQ ID NO: 8689 - protein, 6 aa, ARTIFICIAL SEQUENCE
  Synthetic Construct
AKRSGK

SEQ ID NO: 8690 - protein, 6 aa, ARTIFICIAL SEQUENCE
  Synthetic Construct
AKRSHK

SEQ ID NO: 8691 - protein, 6 aa, ARTIFICIAL SEQUENCE
  Synthetic Construct
AKRSIK

SEQ ID NO: 8692 - protein, 6 aa, ARTIFICIAL SEQUENCE
  Synthetic Construct
AKRSLK

SEQ ID NO: 8693 - protein, 6 aa, ARTIFICIAL SEQUENCE
  Synthetic Construct
AKRSNK

SEQ ID NO: 8694 - protein, 6 aa, ARTIFICIAL SEQUENCE
  Synthetic Construct
AKRSQK

SEQ ID NO: 8695 - protein, 6 aa, ARTIFICIAL SEQUENCE
  Synthetic Construct
AKRSRK

SEQ ID NO: 8696 - protein, 6 aa, ARTIFICIAL SEQUENCE
  Synthetic Construct
AKRSSK

SEQ ID NO: 8697 - protein, 6 aa, ARTIFICIAL SEQUENCE
  Synthetic Construct
AKRSTK

SEQ ID NO: 8698 - protein, 6 aa, ARTIFICIAL SEQUENCE
  Synthetic Construct
AKRSYK

SEQ ID NO: 8699 - protein, 6 aa, ARTIFICIAL SEQUENCE
  Synthetic Construct
AKRTAK

SEQ ID NO: 8700 - protein, 6 aa, ARTIFICIAL SEQUENCE
  Synthetic Construct
AKRTDK

SEQ ID NO: 8701 - protein, 6 aa, ARTIFICIAL SEQUENCE
  Synthetic Construct
AKRTEK

SEQ ID NO: 8702 - protein, 6 aa, ARTIFICIAL SEQUENCE
  Synthetic Construct
AKRTFK

SEQ ID NO: 8703 - protein, 6 aa, ARTIFICIAL SEQUENCE
  Synthetic Construct
AKRTGK

SEQ ID NO: 8704 - protein, 6 aa, ARTIFICIAL SEQUENCE
  Synthetic Construct
AKRTHK

SEQ ID NO: 8705 - protein, 6 aa, ARTIFICIAL SEQUENCE
  Synthetic Construct
AKRTIK

SEQ ID NO: 8706 - protein, 6 aa, ARTIFICIAL SEQUENCE
  Synthetic Construct
AKRTLK

SEQ ID NO: 8707 - protein, 6 aa, ARTIFICIAL SEQUENCE
  Synthetic Construct
AKRTNK

SEQ ID NO: 8708 - protein, 6 aa, ARTIFICIAL SEQUENCE
  Synthetic Construct
AKRTQK

SEQ ID NO: 8709 - protein, 6 aa, ARTIFICIAL SEQUENCE
  Synthetic Construct
AKRTRK

SEQ ID NO: 8710 - protein, 6 aa, ARTIFICIAL SEQUENCE
  Synthetic Construct
AKRTSK

SEQ ID NO: 8711 - protein, 6 aa, ARTIFICIAL SEQUENCE
  Synthetic Construct
AKRTTK

SEQ ID NO: 8712 - protein, 6 aa, ARTIFICIAL SEQUENCE
  Synthetic Construct
AKRTYK

SEQ ID NO: 8713 - protein, 6 aa, ARTIFICIAL SEQUENCE
  Synthetic Construct
AKRYAK

SEQ ID NO: 8714 - protein, 6 aa, ARTIFICIAL SEQUENCE
  Synthetic Construct
AKRYDK

SEQ ID NO: 8715 - protein, 6 aa, ARTIFICIAL SEQUENCE
  Synthetic Construct
AKRYEK

SEQ ID NO: 8716 - protein, 6 aa, ARTIFICIAL SEQUENCE
  Synthetic Construct
AKRYFK

SEQ ID NO: 8717 - protein, 6 aa, ARTIFICIAL SEQUENCE
  Synthetic Construct
AKRYGK

SEQ ID NO: 8718 - protein, 6 aa, ARTIFICIAL SEQUENCE
  Synthetic Construct
AKRYHK

SEQ ID NO: 8719 - protein, 6 aa, ARTIFICIAL SEQUENCE
  Synthetic Construct
AKRYIK

SEQ ID NO: 8720 - protein, 6 aa, ARTIFICIAL SEQUENCE
  Synthetic Construct
AKRYLK

SEQ ID NO: 8721 - protein, 6 aa, ARTIFICIAL SEQUENCE
  Synthetic Construct
AKRYNK

SEQ ID NO: 8722 - protein, 6 aa, ARTIFICIAL SEQUENCE
  Synthetic Construct
AKRYQK

SEQ ID NO: 8723 - protein, 6 aa, ARTIFICIAL SEQUENCE
  Synthetic Construct
AKRYRK

SEQ ID NO: 8724 - protein, 6 aa, ARTIFICIAL SEQUENCE
  Synthetic Construct
AKRYSK

SEQ ID NO: 8725 - protein, 6 aa, ARTIFICIAL SEQUENCE
  Synthetic Construct
AKRYTK

SEQ ID NO: 8726 - protein, 6 aa, ARTIFICIAL SEQUENCE
  Synthetic Construct
AKRYYK

SEQ ID NO: 8727 - protein, 6 aa, ARTIFICIAL SEQUENCE
  Synthetic Construct
AKSAAK

SEQ ID NO: 8728 - protein, 6 aa, ARTIFICIAL SEQUENCE
  Synthetic Construct
AKSADK

SEQ ID NO: 8729 - protein, 6 aa, ARTIFICIAL SEQUENCE
  Synthetic Construct
AKSAEK

SEQ ID NO: 8730 - protein, 6 aa, ARTIFICIAL SEQUENCE
  Synthetic Construct
AKSAFK

SEQ ID NO: 8731 - protein, 6 aa, ARTIFICIAL SEQUENCE
  Synthetic Construct
AKSAGK

SEQ ID NO: 8732 - protein, 6 aa, ARTIFICIAL SEQUENCE
  Synthetic Construct
AKSAHK

SEQ ID NO: 8733 - protein, 6 aa, ARTIFICIAL SEQUENCE
  Synthetic Construct
AKSAIK

SEQ ID NO: 8734 - protein, 6 aa, ARTIFICIAL SEQUENCE
  Synthetic Construct
AKSALK

SEQ ID NO: 8735 - protein, 6 aa, ARTIFICIAL SEQUENCE
  Synthetic Construct
AKSANK

SEQ ID NO: 8736 - protein, 6 aa, ARTIFICIAL SEQUENCE
  Synthetic Construct
AKSAQK

SEQ ID NO: 8737 - protein, 6 aa, ARTIFICIAL SEQUENCE
  Synthetic Construct
AKSARK

SEQ ID NO: 8738 - protein, 6 aa, ARTIFICIAL SEQUENCE
  Synthetic Construct
AKSASK

SEQ ID NO: 8739 - protein, 6 aa, ARTIFICIAL SEQUENCE
  Synthetic Construct
AKSATK

SEQ ID NO: 8740 - protein, 6 aa, ARTIFICIAL SEQUENCE
  Synthetic Construct
AKSAYK

SEQ ID NO: 8741 - protein, 6 aa, ARTIFICIAL SEQUENCE
  Synthetic Construct
AKSDAK

SEQ ID NO: 8742 - protein, 6 aa, ARTIFICIAL SEQUENCE
  Synthetic Construct
AKSDDK

SEQ ID NO: 8743 - protein, 6 aa, ARTIFICIAL SEQUENCE
  Synthetic Construct
AKSDEK

SEQ ID NO: 8744 - protein, 6 aa, ARTIFICIAL SEQUENCE
  Synthetic Construct
AKSDFK

SEQ ID NO: 8745 - protein, 6 aa, ARTIFICIAL SEQUENCE
  Synthetic Construct
AKSDGK

SEQ ID NO: 8746 - protein, 6 aa, ARTIFICIAL SEQUENCE
  Synthetic Construct
AKSDHK

SEQ ID NO: 8747 - protein, 6 aa, ARTIFICIAL SEQUENCE
  Synthetic Construct
AKSDIK

SEQ ID NO: 8748 - protein, 6 aa, ARTIFICIAL SEQUENCE
  Synthetic Construct
AKSDLK

SEQ ID NO: 8749 - protein, 6 aa, ARTIFICIAL SEQUENCE
  Synthetic Construct
AKSDNK

SEQ ID NO: 8750 - protein, 6 aa, ARTIFICIAL SEQUENCE
  Synthetic Construct
AKSDQK

SEQ ID NO: 8751 - protein, 6 aa, ARTIFICIAL SEQUENCE
  Synthetic Construct
AKSDRK

SEQ ID NO: 8752 - protein, 6 aa, ARTIFICIAL SEQUENCE
  Synthetic Construct
AKSDSK

SEQ ID NO: 8753 - protein, 6 aa, ARTIFICIAL SEQUENCE
  Synthetic Construct
AKSDTK

SEQ ID NO: 8754 - protein, 6 aa, ARTIFICIAL SEQUENCE
  Synthetic Construct
AKSDYK

SEQ ID NO: 8755 - protein, 6 aa, ARTIFICIAL SEQUENCE
  Synthetic Construct
AKSEAK

SEQ ID NO: 8756 - protein, 6 aa, ARTIFICIAL SEQUENCE
  Synthetic Construct
AKSEDK

SEQ ID NO: 8757 - protein, 6 aa, ARTIFICIAL SEQUENCE
  Synthetic Construct
AKSEEK

SEQ ID NO: 8758 - protein, 6 aa, ARTIFICIAL SEQUENCE
  Synthetic Construct
AKSEFK

SEQ ID NO: 8759 - protein, 6 aa, ARTIFICIAL SEQUENCE
  Synthetic Construct
AKSEGK

SEQ ID NO: 8760 - protein, 6 aa, ARTIFICIAL SEQUENCE
  Synthetic Construct
AKSEHK

SEQ ID NO: 8761 - protein, 6 aa, ARTIFICIAL SEQUENCE
  Synthetic Construct
AKSEIK

SEQ ID NO: 8762 - protein, 6 aa, ARTIFICIAL SEQUENCE
  Synthetic Construct
AKSELK

SEQ ID NO: 8763 - protein, 6 aa, ARTIFICIAL SEQUENCE
  Synthetic Construct
AKSENK

SEQ ID NO: 8764 - protein, 6 aa, ARTIFICIAL SEQUENCE
  Synthetic Construct
AKSEQK

SEQ ID NO: 8765 - protein, 6 aa, ARTIFICIAL SEQUENCE
  Synthetic Construct
AKSERK

SEQ ID NO: 8766 - protein, 6 aa, ARTIFICIAL SEQUENCE
  Synthetic Construct
AKSESK

SEQ ID NO: 8767 - protein, 6 aa, ARTIFICIAL SEQUENCE
  Synthetic Construct
AKSETK

SEQ ID NO: 8768 - protein, 6 aa, ARTIFICIAL SEQUENCE
  Synthetic Construct
AKSEYK

SEQ ID NO: 8769 - protein, 6 aa, ARTIFICIAL SEQUENCE
  Synthetic Construct
AKSFAK

SEQ ID NO: 8770 - protein, 6 aa, ARTIFICIAL SEQUENCE
  Synthetic Construct
AKSFDK

SEQ ID NO: 8771 - protein, 6 aa, ARTIFICIAL SEQUENCE
  Synthetic Construct
AKSFEK

SEQ ID NO: 8772 - protein, 6 aa, ARTIFICIAL SEQUENCE
  Synthetic Construct
AKSFFK

SEQ ID NO: 8773 - protein, 6 aa, ARTIFICIAL SEQUENCE
  Synthetic Construct
AKSFGK

SEQ ID NO: 8774 - protein, 6 aa, ARTIFICIAL SEQUENCE
  Synthetic Construct
AKSFHK

SEQ ID NO: 8775 - protein, 6 aa, ARTIFICIAL SEQUENCE
  Synthetic Construct
AKSFIK

SEQ ID NO: 8776 - protein, 6 aa, ARTIFICIAL SEQUENCE
  Synthetic Construct
AKSFLK

SEQ ID NO: 8777 - protein, 6 aa, ARTIFICIAL SEQUENCE
  Synthetic Construct
AKSFNK

SEQ ID NO: 8778 - protein, 6 aa, ARTIFICIAL SEQUENCE
  Synthetic Construct
AKSFQK

SEQ ID NO: 8779 - protein, 6 aa, ARTIFICIAL SEQUENCE
  Synthetic Construct
AKSFRK

SEQ ID NO: 8780 - protein, 6 aa, ARTIFICIAL SEQUENCE
  Synthetic Construct
AKSFSK

SEQ ID NO: 8781 - protein, 6 aa, ARTIFICIAL SEQUENCE
  Synthetic Construct
AKSFTK

SEQ ID NO: 8782 - protein, 6 aa, ARTIFICIAL SEQUENCE
  Synthetic Construct
AKSFYK

SEQ ID NO: 8783 - protein, 6 aa, ARTIFICIAL SEQUENCE
  Synthetic Construct
AKSGAK

SEQ ID NO: 8784 - protein, 6 aa, ARTIFICIAL SEQUENCE
  Synthetic Construct
AKSGDK

SEQ ID NO: 8785 - protein, 6 aa, ARTIFICIAL SEQUENCE
  Synthetic Construct
AKSGEK

SEQ ID NO: 8786 - protein, 6 aa, ARTIFICIAL SEQUENCE
  Synthetic Construct
AKSGFK

SEQ ID NO: 8787 - protein, 6 aa, ARTIFICIAL SEQUENCE
  Synthetic Construct
AKSGGK

SEQ ID NO: 8788 - protein, 6 aa, ARTIFICIAL SEQUENCE
  Synthetic Construct
AKSGHK

SEQ ID NO: 8789 - protein, 6 aa, ARTIFICIAL SEQUENCE
  Synthetic Construct
AKSGIK

SEQ ID NO: 8790 - protein, 6 aa, ARTIFICIAL SEQUENCE
  Synthetic Construct
AKSGLK

SEQ ID NO: 8791 - protein, 6 aa, ARTIFICIAL SEQUENCE
  Synthetic Construct
AKSGNK

SEQ ID NO: 8792 - protein, 6 aa, ARTIFICIAL SEQUENCE
  Synthetic Construct
AKSGQK

SEQ ID NO: 8793 - protein, 6 aa, ARTIFICIAL SEQUENCE
  Synthetic Construct
AKSGRK

SEQ ID NO: 8794 - protein, 6 aa, ARTIFICIAL SEQUENCE
  Synthetic Construct
AKSGSK

SEQ ID NO: 8795 - protein, 6 aa, ARTIFICIAL SEQUENCE
  Synthetic Construct
AKSGTK

SEQ ID NO: 8796 - protein, 6 aa, ARTIFICIAL SEQUENCE
  Synthetic Construct
AKSGYK

SEQ ID NO: 8797 - protein, 6 aa, ARTIFICIAL SEQUENCE
  Synthetic Construct
AKSHAK

SEQ ID NO: 8798 - protein, 6 aa, ARTIFICIAL SEQUENCE
  Synthetic Construct
AKSHDK

SEQ ID NO: 8799 - protein, 6 aa, ARTIFICIAL SEQUENCE
  Synthetic Construct
AKSHEK

SEQ ID NO: 8800 - protein, 6 aa, ARTIFICIAL SEQUENCE
  Synthetic Construct
AKSHFK

SEQ ID NO: 8801 - protein, 6 aa, ARTIFICIAL SEQUENCE
  Synthetic Construct
AKSHGK

SEQ ID NO: 8802 - protein, 6 aa, ARTIFICIAL SEQUENCE
  Synthetic Construct
AKSHHK

SEQ ID NO: 8803 - protein, 6 aa, ARTIFICIAL SEQUENCE
  Synthetic Construct
AKSHIK

SEQ ID NO: 8804 - protein, 6 aa, ARTIFICIAL SEQUENCE
  Synthetic Construct
AKSHLK

SEQ ID NO: 8805 - protein, 6 aa, ARTIFICIAL SEQUENCE
  Synthetic Construct
AKSHNK

SEQ ID NO: 8806 - protein, 6 aa, ARTIFICIAL SEQUENCE
  Synthetic Construct
AKSHQK

SEQ ID NO: 8807 - protein, 6 aa, ARTIFICIAL SEQUENCE
  Synthetic Construct
AKSHRK

SEQ ID NO: 8808 - protein, 6 aa, ARTIFICIAL SEQUENCE
  Synthetic Construct
AKSHSK

SEQ ID NO: 8809 - protein, 6 aa, ARTIFICIAL SEQUENCE
  Synthetic Construct
AKSHTK

SEQ ID NO: 8810 - protein, 6 aa, ARTIFICIAL SEQUENCE
  Synthetic Construct
AKSHYK

SEQ ID NO: 8811 - protein, 6 aa, ARTIFICIAL SEQUENCE
  Synthetic Construct
AKSIAK

SEQ ID NO: 8812 - protein, 6 aa, ARTIFICIAL SEQUENCE
  Synthetic Construct
AKSIDK

SEQ ID NO: 8813 - protein, 6 aa, ARTIFICIAL SEQUENCE
  Synthetic Construct
AKSIEK

SEQ ID NO: 8814 - protein, 6 aa, ARTIFICIAL SEQUENCE
  Synthetic Construct
AKSIFK

SEQ ID NO: 8815 - protein, 6 aa, ARTIFICIAL SEQUENCE
  Synthetic Construct
AKSIGK

SEQ ID NO: 8816 - protein, 6 aa, ARTIFICIAL SEQUENCE
  Synthetic Construct
AKSIHK

SEQ ID NO: 8817 - protein, 6 aa, ARTIFICIAL SEQUENCE
  Synthetic Construct
AKSIIK

SEQ ID NO: 8818 - protein, 6 aa, ARTIFICIAL SEQUENCE
  Synthetic Construct
AKSILK

SEQ ID NO: 8819 - protein, 6 aa, ARTIFICIAL SEQUENCE
  Synthetic Construct
AKSINK

SEQ ID NO: 8820 - protein, 6 aa, ARTIFICIAL SEQUENCE
  Synthetic Construct
AKSIQK

SEQ ID NO: 8821 - protein, 6 aa, ARTIFICIAL SEQUENCE
  Synthetic Construct
AKSIRK

SEQ ID NO: 8822 - protein, 6 aa, ARTIFICIAL SEQUENCE
  Synthetic Construct
AKSISK

SEQ ID NO: 8823 - protein, 6 aa, ARTIFICIAL SEQUENCE
  Synthetic Construct
AKSITK

SEQ ID NO: 8824 - protein, 6 aa, ARTIFICIAL SEQUENCE
  Synthetic Construct
AKSIYK

SEQ ID NO: 8825 - protein, 6 aa, ARTIFICIAL SEQUENCE
  Synthetic Construct
AKSLAK

SEQ ID NO: 8826 - protein, 6 aa, ARTIFICIAL SEQUENCE
  Synthetic Construct
AKSLDK

SEQ ID NO: 8827 - protein, 6 aa, ARTIFICIAL SEQUENCE
  Synthetic Construct
AKSLEK

SEQ ID NO: 8828 - protein, 6 aa, ARTIFICIAL SEQUENCE
  Synthetic Construct
AKSLFK

SEQ ID NO: 8829 - protein, 6 aa, ARTIFICIAL SEQUENCE
  Synthetic Construct
AKSLGK

SEQ ID NO: 8830 - protein, 6 aa, ARTIFICIAL SEQUENCE
  Synthetic Construct
AKSLHK

SEQ ID NO: 8831 - protein, 6 aa, ARTIFICIAL SEQUENCE
  Synthetic Construct
AKSLIK

SEQ ID NO: 8832 - protein, 6 aa, ARTIFICIAL SEQUENCE
  Synthetic Construct
AKSLLK

SEQ ID NO: 8833 - protein, 6 aa, ARTIFICIAL SEQUENCE
  Synthetic Construct
AKSLNK

SEQ ID NO: 8834 - protein, 6 aa, ARTIFICIAL SEQUENCE
  Synthetic Construct
AKSLQK

SEQ ID NO: 8835 - protein, 6 aa, ARTIFICIAL SEQUENCE
  Synthetic Construct
AKSLRK

SEQ ID NO: 8836 - protein, 6 aa, ARTIFICIAL SEQUENCE
  Synthetic Construct
AKSLSK

SEQ ID NO: 8837 - protein, 6 aa, ARTIFICIAL SEQUENCE
  Synthetic Construct
AKSLTK

SEQ ID NO: 8838 - protein, 6 aa, ARTIFICIAL SEQUENCE
  Synthetic Construct
AKSLYK

SEQ ID NO: 8839 - protein, 6 aa, ARTIFICIAL SEQUENCE
  Synthetic Construct
AKSNAK

SEQ ID NO: 8840 - protein, 6 aa, ARTIFICIAL SEQUENCE
  Synthetic Construct
AKSNDK

SEQ ID NO: 8841 - protein, 6 aa, ARTIFICIAL SEQUENCE
  Synthetic Construct
AKSNEK

SEQ ID NO: 8842 - protein, 6 aa, ARTIFICIAL SEQUENCE
  Synthetic Construct
AKSNFK

SEQ ID NO: 8843 - protein, 6 aa, ARTIFICIAL SEQUENCE
  Synthetic Construct
AKSNGK

SEQ ID NO: 8844 - protein, 6 aa, ARTIFICIAL SEQUENCE
  Synthetic Construct
AKSNHK

SEQ ID NO: 8845 - protein, 6 aa, ARTIFICIAL SEQUENCE
  Synthetic Construct
AKSNIK

SEQ ID NO: 8846 - protein, 6 aa, ARTIFICIAL SEQUENCE
  Synthetic Construct
AKSNLK

SEQ ID NO: 8847 - protein, 6 aa, ARTIFICIAL SEQUENCE
  Synthetic Construct
AKSNNK

SEQ ID NO: 8848 - protein, 6 aa, ARTIFICIAL SEQUENCE
  Synthetic Construct
AKSNQK

SEQ ID NO: 8849 - protein, 6 aa, ARTIFICIAL SEQUENCE
  Synthetic Construct
AKSNRK

SEQ ID NO: 8850 - protein, 6 aa, ARTIFICIAL SEQUENCE
  Synthetic Construct
AKSNSK

SEQ ID NO: 8851 - protein, 6 aa, ARTIFICIAL SEQUENCE
  Synthetic Construct
AKSNTK

SEQ ID NO: 8852 - protein, 6 aa, ARTIFICIAL SEQUENCE
  Synthetic Construct
AKSNYK

SEQ ID NO: 8853 - protein, 6 aa, ARTIFICIAL SEQUENCE
  Synthetic Construct
AKSQAK

SEQ ID NO: 8854 - protein, 6 aa, ARTIFICIAL SEQUENCE
  Synthetic Construct
AKSQDK

SEQ ID NO: 8855 - protein, 6 aa, ARTIFICIAL SEQUENCE
  Synthetic Construct
AKSQEK

SEQ ID NO: 8856 - protein, 6 aa, ARTIFICIAL SEQUENCE
  Synthetic Construct
AKSQFK

SEQ ID NO: 8857 - protein, 6 aa, ARTIFICIAL SEQUENCE
  Synthetic Construct
AKSQGK

SEQ ID NO: 8858 - protein, 6 aa, ARTIFICIAL SEQUENCE
  Synthetic Construct
AKSQHK

SEQ ID NO: 8859 - protein, 6 aa, ARTIFICIAL SEQUENCE
  Synthetic Construct
AKSQIK

SEQ ID NO: 8860 - protein, 6 aa, ARTIFICIAL SEQUENCE
  Synthetic Construct
AKSQLK

SEQ ID NO: 8861 - protein, 6 aa, ARTIFICIAL SEQUENCE
  Synthetic Construct
AKSQNK

SEQ ID NO: 8862 - protein, 6 aa, ARTIFICIAL SEQUENCE
  Synthetic Construct
AKSQQK

SEQ ID NO: 8863 - protein, 6 aa, ARTIFICIAL SEQUENCE
  Synthetic Construct
AKSQRK

SEQ ID NO: 8864 - protein, 6 aa, ARTIFICIAL SEQUENCE
  Synthetic Construct
AKSQSK

SEQ ID NO: 8865 - protein, 6 aa, ARTIFICIAL SEQUENCE
  Synthetic Construct
AKSQTK

SEQ ID NO: 8866 - protein, 6 aa, ARTIFICIAL SEQUENCE
  Synthetic Construct
AKSQYK

SEQ ID NO: 8867 - protein, 6 aa, ARTIFICIAL SEQUENCE
  Synthetic Construct
AKSRAK

SEQ ID NO: 8868 - protein, 6 aa, ARTIFICIAL SEQUENCE
  Synthetic Construct
AKSRDK

SEQ ID NO: 8869 - protein, 6 aa, ARTIFICIAL SEQUENCE
  Synthetic Construct
AKSREK

SEQ ID NO: 8870 - protein, 6 aa, ARTIFICIAL SEQUENCE
  Synthetic Construct
AKSRFK

SEQ ID NO: 8871 - protein, 6 aa, ARTIFICIAL SEQUENCE
  Synthetic Construct
AKSRGK

SEQ ID NO: 8872 - protein, 6 aa, ARTIFICIAL SEQUENCE
  Synthetic Construct
AKSRHK

SEQ ID NO: 8873 - protein, 6 aa, ARTIFICIAL SEQUENCE
  Synthetic Construct
AKSRIK

SEQ ID NO: 8874 - protein, 6 aa, ARTIFICIAL SEQUENCE
  Synthetic Construct
AKSRLK

SEQ ID NO: 8875 - protein, 6 aa, ARTIFICIAL SEQUENCE
  Synthetic Construct
AKSRNK

SEQ ID NO: 8876 - protein, 6 aa, ARTIFICIAL SEQUENCE
  Synthetic Construct
AKSRQK

SEQ ID NO: 8877 - protein, 6 aa, ARTIFICIAL SEQUENCE
  Synthetic Construct
AKSRRK

SEQ ID NO: 8878 - protein, 6 aa, ARTIFICIAL SEQUENCE
  Synthetic Construct
AKSRSK

SEQ ID NO: 8879 - protein, 6 aa, ARTIFICIAL SEQUENCE
  Synthetic Construct
AKSRTK

SEQ ID NO: 8880 - protein, 6 aa, ARTIFICIAL SEQUENCE
  Synthetic Construct
AKSRYK

SEQ ID NO: 8881 - protein, 6 aa, ARTIFICIAL SEQUENCE
  Synthetic Construct
AKSSAK

SEQ ID NO: 8882 - protein, 6 aa, ARTIFICIAL SEQUENCE
  Synthetic Construct
AKSSDK

SEQ ID NO: 8883 - protein, 6 aa, ARTIFICIAL SEQUENCE
  Synthetic Construct
AKSSEK

SEQ ID NO: 8884 - protein, 6 aa, ARTIFICIAL SEQUENCE
  Synthetic Construct
AKSSFK

SEQ ID NO: 8885 - protein, 6 aa, ARTIFICIAL SEQUENCE
  Synthetic Construct
AKSSGK

SEQ ID NO: 8886 - protein, 6 aa, ARTIFICIAL SEQUENCE
  Synthetic Construct
AKSSHK

SEQ ID NO: 8887 - protein, 6 aa, ARTIFICIAL SEQUENCE
  Synthetic Construct
AKSSIK

SEQ ID NO: 8888 - protein, 6 aa, ARTIFICIAL SEQUENCE
  Synthetic Construct
AKSSLK

SEQ ID NO: 8889 - protein, 6 aa, ARTIFICIAL SEQUENCE
  Synthetic Construct
AKSSNK

SEQ ID NO: 8890 - protein, 6 aa, ARTIFICIAL SEQUENCE
  Synthetic Construct
AKSSQK

SEQ ID NO: 8891 - protein, 6 aa, ARTIFICIAL SEQUENCE
  Synthetic Construct
AKSSRK

SEQ ID NO: 8892 - protein, 6 aa, ARTIFICIAL SEQUENCE
  Synthetic Construct
AKSSSK

SEQ ID NO: 8893 - protein, 6 aa, ARTIFICIAL SEQUENCE
  Synthetic Construct
AKSSTK

SEQ ID NO: 8894 - protein, 6 aa, ARTIFICIAL SEQUENCE
  Synthetic Construct
AKSSYK

SEQ ID NO: 8895 - protein, 6 aa, ARTIFICIAL SEQUENCE
  Synthetic Construct
AKSTAK

SEQ ID NO: 8896 - protein, 6 aa, ARTIFICIAL SEQUENCE
  Synthetic Construct
AKSTDK

SEQ ID NO: 8897 - protein, 6 aa, ARTIFICIAL SEQUENCE
  Synthetic Construct
AKSTEK

SEQ ID NO: 8898 - protein, 6 aa, ARTIFICIAL SEQUENCE
  Synthetic Construct
AKSTFK

SEQ ID NO: 8899 - protein, 6 aa, ARTIFICIAL SEQUENCE
  Synthetic Construct
AKSTGK

SEQ ID NO: 8900 - protein, 6 aa, ARTIFICIAL SEQUENCE
  Synthetic Construct
AKSTHK

SEQ ID NO: 8901 - protein, 6 aa, ARTIFICIAL SEQUENCE
  Synthetic Construct
AKSTIK

SEQ ID NO: 8902 - protein, 6 aa, ARTIFICIAL SEQUENCE
  Synthetic Construct
AKSTLK

SEQ ID NO: 8903 - protein, 6 aa, ARTIFICIAL SEQUENCE
  Synthetic Construct
AKSTNK

SEQ ID NO: 8904 - protein, 6 aa, ARTIFICIAL SEQUENCE
  Synthetic Construct
AKSTQK

SEQ ID NO: 8905 - protein, 6 aa, ARTIFICIAL SEQUENCE
  Synthetic Construct
AKSTRK

SEQ ID NO: 8906 - protein, 6 aa, ARTIFICIAL SEQUENCE
  Synthetic Construct
AKSTSK

SEQ ID NO: 8907 - protein, 6 aa, ARTIFICIAL SEQUENCE
  Synthetic Construct
AKSTTK

SEQ ID NO: 8908 - protein, 6 aa, ARTIFICIAL SEQUENCE
  Synthetic Construct
AKSTYK

SEQ ID NO: 8909 - protein, 6 aa, ARTIFICIAL SEQUENCE
  Synthetic Construct
AKSYAK

SEQ ID NO: 8910 - protein, 6 aa, ARTIFICIAL SEQUENCE
  Synthetic Construct
AKSYDK

SEQ ID NO: 8911 - protein, 6 aa, ARTIFICIAL SEQUENCE
  Synthetic Construct
AKSYEK

SEQ ID NO: 8912 - protein, 6 aa, ARTIFICIAL SEQUENCE
  Synthetic Construct
AKSYFK

SEQ ID NO: 8913 - protein, 6 aa, ARTIFICIAL SEQUENCE
  Synthetic Construct
AKSYGK

SEQ ID NO: 8914 - protein, 6 aa, ARTIFICIAL SEQUENCE
  Synthetic Construct
AKSYHK

SEQ ID NO: 8915 - protein, 6 aa, ARTIFICIAL SEQUENCE
  Synthetic Construct
AKSYIK

SEQ ID NO: 8916 - protein, 6 aa, ARTIFICIAL SEQUENCE
  Synthetic Construct
AKSYLK

SEQ ID NO: 8917 - protein, 6 aa, ARTIFICIAL SEQUENCE
  Synthetic Construct
AKSYNK

SEQ ID NO: 8918 - protein, 6 aa, ARTIFICIAL SEQUENCE
  Synthetic Construct
AKSYQK

SEQ ID NO: 8919 - protein, 6 aa, ARTIFICIAL SEQUENCE
  Synthetic Construct
AKSYRK

SEQ ID NO: 8920 - protein, 6 aa, ARTIFICIAL SEQUENCE
  Synthetic Construct
AKSYSK

SEQ ID NO: 8921 - protein, 6 aa, ARTIFICIAL SEQUENCE
  Synthetic Construct
AKSYTK

SEQ ID NO: 8922 - protein, 6 aa, ARTIFICIAL SEQUENCE
  Synthetic Construct
AKSYYK

SEQ ID NO: 8923 - protein, 6 aa, ARTIFICIAL SEQUENCE
  Synthetic Construct
AKTAAK

SEQ ID NO: 8924 - protein, 6 aa, ARTIFICIAL SEQUENCE
  Synthetic Construct
AKTADK

SEQ ID NO: 8925 - protein, 6 aa, ARTIFICIAL SEQUENCE
  Synthetic Construct
AKTAEK

SEQ ID NO: 8926 - protein, 6 aa, ARTIFICIAL SEQUENCE
  Synthetic Construct
AKTAFK

SEQ ID NO: 8927 - protein, 6 aa, ARTIFICIAL SEQUENCE
  Synthetic Construct
AKTAGK

SEQ ID NO: 8928 - protein, 6 aa, ARTIFICIAL SEQUENCE
  Synthetic Construct
AKTAHK

SEQ ID NO: 8929 - protein, 6 aa, ARTIFICIAL SEQUENCE
  Synthetic Construct
AKTAIK

SEQ ID NO: 8930 - protein, 6 aa, ARTIFICIAL SEQUENCE
  Synthetic Construct
AKTALK

SEQ ID NO: 8931 - protein, 6 aa, ARTIFICIAL SEQUENCE
  Synthetic Construct
AKTANK

SEQ ID NO: 8932 - protein, 6 aa, ARTIFICIAL SEQUENCE
  Synthetic Construct
AKTAQK

SEQ ID NO: 8933 - protein, 6 aa, ARTIFICIAL SEQUENCE
  Synthetic Construct
AKTARK

SEQ ID NO: 8934 - protein, 6 aa, ARTIFICIAL SEQUENCE
  Synthetic Construct
AKTASK

SEQ ID NO: 8935 - protein, 6 aa, ARTIFICIAL SEQUENCE
  Synthetic Construct
AKTATK

SEQ ID NO: 8936 - protein, 6 aa, ARTIFICIAL SEQUENCE
  Synthetic Construct
AKTAYK

SEQ ID NO: 8937 - protein, 6 aa, ARTIFICIAL SEQUENCE
  Synthetic Construct
AKTDAK

SEQ ID NO: 8938 - protein, 6 aa, ARTIFICIAL SEQUENCE
  Synthetic Construct
AKTDDK

SEQ ID NO: 8939 - protein, 6 aa, ARTIFICIAL SEQUENCE
  Synthetic Construct
AKTDEK

SEQ ID NO: 8940 - protein, 6 aa, ARTIFICIAL SEQUENCE
  Synthetic Construct
AKTDFK

SEQ ID NO: 8941 - protein, 6 aa, ARTIFICIAL SEQUENCE
  Synthetic Construct
AKTDGK

SEQ ID NO: 8942 - protein, 6 aa, ARTIFICIAL SEQUENCE
  Synthetic Construct
AKTDHK

SEQ ID NO: 8943 - protein, 6 aa, ARTIFICIAL SEQUENCE
  Synthetic Construct
AKTDIK

SEQ ID NO: 8944 - protein, 6 aa, ARTIFICIAL SEQUENCE
  Synthetic Construct
AKTDLK

SEQ ID NO: 8945 - protein, 6 aa, ARTIFICIAL SEQUENCE
  Synthetic Construct
AKTDNK

SEQ ID NO: 8946 - protein, 6 aa, ARTIFICIAL SEQUENCE
  Synthetic Construct
AKTDQK

SEQ ID NO: 8947 - protein, 6 aa, ARTIFICIAL SEQUENCE
  Synthetic Construct
AKTDRK

SEQ ID NO: 8948 - protein, 6 aa, ARTIFICIAL SEQUENCE
  Synthetic Construct
AKTDSK

SEQ ID NO: 8949 - protein, 6 aa, ARTIFICIAL SEQUENCE
  Synthetic Construct
AKTDTK

SEQ ID NO: 8950 - protein, 6 aa, ARTIFICIAL SEQUENCE
  Synthetic Construct
AKTDYK

SEQ ID NO: 8951 - protein, 6 aa, ARTIFICIAL SEQUENCE
  Synthetic Construct
AKTEAK

SEQ ID NO: 8952 - protein, 6 aa, ARTIFICIAL SEQUENCE
  Synthetic Construct
AKTEDK

SEQ ID NO: 8953 - protein, 6 aa, ARTIFICIAL SEQUENCE
  Synthetic Construct
AKTEEK

SEQ ID NO: 8954 - protein, 6 aa, ARTIFICIAL SEQUENCE
  Synthetic Construct
AKTEFK

SEQ ID NO: 8955 - protein, 6 aa, ARTIFICIAL SEQUENCE
  Synthetic Construct
AKTEGK

SEQ ID NO: 8956 - protein, 6 aa, ARTIFICIAL SEQUENCE
  Synthetic Construct
AKTEHK

SEQ ID NO: 8957 - protein, 6 aa, ARTIFICIAL SEQUENCE
  Synthetic Construct
AKTEIK

SEQ ID NO: 8958 - protein, 6 aa, ARTIFICIAL SEQUENCE
  Synthetic Construct
AKTELK

SEQ ID NO: 8959 - protein, 6 aa, ARTIFICIAL SEQUENCE
  Synthetic Construct
AKTENK

SEQ ID NO: 8960 - protein, 6 aa, ARTIFICIAL SEQUENCE
  Synthetic Construct
AKTEQK

SEQ ID NO: 8961 - protein, 6 aa, ARTIFICIAL SEQUENCE
  Synthetic Construct
AKTERK

SEQ ID NO: 8962 - protein, 6 aa, ARTIFICIAL SEQUENCE
  Synthetic Construct
AKTESK

SEQ ID NO: 8963 - protein, 6 aa, ARTIFICIAL SEQUENCE
  Synthetic Construct
AKTETK

SEQ ID NO: 8964 - protein, 6 aa, ARTIFICIAL SEQUENCE
  Synthetic Construct
AKTEYK

SEQ ID NO: 8965 - protein, 6 aa, ARTIFICIAL SEQUENCE
  Synthetic Construct
AKTFAK

SEQ ID NO: 8966 - protein, 6 aa, ARTIFICIAL SEQUENCE
  Synthetic Construct
AKTFDK

SEQ ID NO: 8967 - protein, 6 aa, ARTIFICIAL SEQUENCE
  Synthetic Construct
AKTFEK

SEQ ID NO: 8968 - protein, 6 aa, ARTIFICIAL SEQUENCE
  Synthetic Construct
AKTFFK

SEQ ID NO: 8969 - protein, 6 aa, ARTIFICIAL SEQUENCE
  Synthetic Construct
AKTFGK

SEQ ID NO: 8970 - protein, 6 aa, ARTIFICIAL SEQUENCE
  Synthetic Construct
AKTFHK

SEQ ID NO: 8971 - protein, 6 aa, ARTIFICIAL SEQUENCE
  Synthetic Construct
AKTFIK

SEQ ID NO: 8972 - protein, 6 aa, ARTIFICIAL SEQUENCE
  Synthetic Construct
AKTFLK

SEQ ID NO: 8973 - protein, 6 aa, ARTIFICIAL SEQUENCE
  Synthetic Construct
AKTFNK

SEQ ID NO: 8974 - protein, 6 aa, ARTIFICIAL SEQUENCE
  Synthetic Construct
AKTFQK

SEQ ID NO: 8975 - protein, 6 aa, ARTIFICIAL SEQUENCE
  Synthetic Construct
AKTFRK

SEQ ID NO: 8976 - protein, 6 aa, ARTIFICIAL SEQUENCE
  Synthetic Construct
AKTFSK

SEQ ID NO: 8977 - protein, 6 aa, ARTIFICIAL SEQUENCE
  Synthetic Construct
AKTFTK

SEQ ID NO: 8978 - protein, 6 aa, ARTIFICIAL SEQUENCE
  Synthetic Construct
AKTFYK

SEQ ID NO: 8979 - protein, 6 aa, ARTIFICIAL SEQUENCE
  Synthetic Construct
AKTGAK

SEQ ID NO: 8980 - protein, 6 aa, ARTIFICIAL SEQUENCE
  Synthetic Construct
AKTGDK

SEQ ID NO: 8981 - protein, 6 aa, ARTIFICIAL SEQUENCE
  Synthetic Construct
AKTGEK

SEQ ID NO: 8982 - protein, 6 aa, ARTIFICIAL SEQUENCE
  Synthetic Construct
AKTGFK

SEQ ID NO: 8983 - protein, 6 aa, ARTIFICIAL SEQUENCE
  Synthetic Construct
AKTGGK

SEQ ID NO: 8984 - protein, 6 aa, ARTIFICIAL SEQUENCE
  Synthetic Construct
AKTGHK

SEQ ID NO: 8985 - protein, 6 aa, ARTIFICIAL SEQUENCE
  Synthetic Construct
AKTGIK

SEQ ID NO: 8986 - protein, 6 aa, ARTIFICIAL SEQUENCE
  Synthetic Construct
AKTGLK

SEQ ID NO: 8987 - protein, 6 aa, ARTIFICIAL SEQUENCE
  Synthetic Construct
AKTGNK

SEQ ID NO: 8988 - protein, 6 aa, ARTIFICIAL SEQUENCE
  Synthetic Construct
AKTGQK

SEQ ID NO: 8989 - protein, 6 aa, ARTIFICIAL SEQUENCE
  Synthetic Construct
AKTGRK

SEQ ID NO: 8990 - protein, 6 aa, ARTIFICIAL SEQUENCE
  Synthetic Construct
AKTGSK

SEQ ID NO: 8991 - protein, 6 aa, ARTIFICIAL SEQUENCE
  Synthetic Construct
AKTGTK

SEQ ID NO: 8992 - protein, 6 aa, ARTIFICIAL SEQUENCE
  Synthetic Construct
AKTGYK

SEQ ID NO: 8993 - protein, 6 aa, ARTIFICIAL SEQUENCE
  Synthetic Construct
AKTHAK

SEQ ID NO: 8994 - protein, 6 aa, ARTIFICIAL SEQUENCE
  Synthetic Construct
AKTHDK

SEQ ID NO: 8995 - protein, 6 aa, ARTIFICIAL SEQUENCE
  Synthetic Construct
AKTHEK

SEQ ID NO: 8996 - protein, 6 aa, ARTIFICIAL SEQUENCE
  Synthetic Construct
AKTHFK

SEQ ID NO: 8997 - protein, 6 aa, ARTIFICIAL SEQUENCE
  Synthetic Construct
AKTHGK

SEQ ID NO: 8998 - protein, 6 aa, ARTIFICIAL SEQUENCE
  Synthetic Construct
AKTHHK

SEQ ID NO: 8999 - protein, 6 aa, ARTIFICIAL SEQUENCE
  Synthetic Construct
AKTHIK

SEQ ID NO: 9000 - protein, 6 aa, ARTIFICIAL SEQUENCE
  Synthetic Construct
AKTHLK

SEQ ID NO: 9001 - protein, 6 aa, ARTIFICIAL SEQUENCE
  Synthetic Construct
AKTHNK

SEQ ID NO: 9002 - protein, 6 aa, ARTIFICIAL SEQUENCE
  Synthetic Construct
AKTHQK

SEQ ID NO: 9003 - protein, 6 aa, ARTIFICIAL SEQUENCE
  Synthetic Construct
AKTHRK

SEQ ID NO: 9004 - protein, 6 aa, ARTIFICIAL SEQUENCE
  Synthetic Construct
AKTHSK

SEQ ID NO: 9005 - protein, 6 aa, ARTIFICIAL SEQUENCE
  Synthetic Construct
AKTHTK

SEQ ID NO: 9006 - protein, 6 aa, ARTIFICIAL SEQUENCE
  Synthetic Construct
AKTHYK

SEQ ID NO: 9007 - protein, 6 aa, ARTIFICIAL SEQUENCE
  Synthetic Construct
AKTIAK

SEQ ID NO: 9008 - protein, 6 aa, ARTIFICIAL SEQUENCE
  Synthetic Construct
AKTIDK

SEQ ID NO: 9009 - protein, 6 aa, ARTIFICIAL SEQUENCE
  Synthetic Construct
AKTIEK

SEQ ID NO: 9010 - protein, 6 aa, ARTIFICIAL SEQUENCE
  Synthetic Construct
AKTIFK

SEQ ID NO: 9011 - protein, 6 aa, ARTIFICIAL SEQUENCE
  Synthetic Construct
AKTIGK

SEQ ID NO: 9012 - protein, 6 aa, ARTIFICIAL SEQUENCE
  Synthetic Construct
AKTIHK

SEQ ID NO: 9013 - protein, 6 aa, ARTIFICIAL SEQUENCE
  Synthetic Construct
AKTIIK

SEQ ID NO: 9014 - protein, 6 aa, ARTIFICIAL SEQUENCE
  Synthetic Construct
AKTILK

SEQ ID NO: 9015 - protein, 6 aa, ARTIFICIAL SEQUENCE
  Synthetic Construct
AKTINK

SEQ ID NO: 9016 - protein, 6 aa, ARTIFICIAL SEQUENCE
  Synthetic Construct
AKTIQK

SEQ ID NO: 9017 - protein, 6 aa, ARTIFICIAL SEQUENCE
  Synthetic Construct
AKTIRK

SEQ ID NO: 9018 - protein, 6 aa, ARTIFICIAL SEQUENCE
  Synthetic Construct
AKTISK

SEQ ID NO: 9019 - protein, 6 aa, ARTIFICIAL SEQUENCE
  Synthetic Construct
AKTITK

SEQ ID NO: 9020 - protein, 6 aa, ARTIFICIAL SEQUENCE
  Synthetic Construct
AKTIYK

SEQ ID NO: 9021 - protein, 6 aa, ARTIFICIAL SEQUENCE
  Synthetic Construct
AKTLAK

SEQ ID NO: 9022 - protein, 6 aa, ARTIFICIAL SEQUENCE
  Synthetic Construct
AKTLDK

SEQ ID NO: 9023 - protein, 6 aa, ARTIFICIAL SEQUENCE
  Synthetic Construct
AKTLEK

SEQ ID NO: 9024 - protein, 6 aa, ARTIFICIAL SEQUENCE
  Synthetic Construct
AKTLFK

SEQ ID NO: 9025 - protein, 6 aa, ARTIFICIAL SEQUENCE
  Synthetic Construct
AKTLGK

SEQ ID NO: 9026 - protein, 6 aa, ARTIFICIAL SEQUENCE
  Synthetic Construct
AKTLHK

SEQ ID NO: 9027 - protein, 6 aa, ARTIFICIAL SEQUENCE
  Synthetic Construct
AKTLIK

SEQ ID NO: 9028 - protein, 6 aa, ARTIFICIAL SEQUENCE
  Synthetic Construct
AKTLLK

SEQ ID NO: 9029 - protein, 6 aa, ARTIFICIAL SEQUENCE
  Synthetic Construct
AKTLNK

SEQ ID NO: 9030 - protein, 6 aa, ARTIFICIAL SEQUENCE
  Synthetic Construct
AKTLQK

SEQ ID NO: 9031 - protein, 6 aa, ARTIFICIAL SEQUENCE
  Synthetic Construct
AKTLRK

SEQ ID NO: 9032 - protein, 6 aa, ARTIFICIAL SEQUENCE
  Synthetic Construct
AKTLSK

SEQ ID NO: 9033 - protein, 6 aa, ARTIFICIAL SEQUENCE
  Synthetic Construct
AKTLTK

SEQ ID NO: 9034 - protein, 6 aa, ARTIFICIAL SEQUENCE
  Synthetic Construct
AKTLYK

SEQ ID NO: 9035 - protein, 6 aa, ARTIFICIAL SEQUENCE
  Synthetic Construct
AKTNAK

SEQ ID NO: 9036 - protein, 6 aa, ARTIFICIAL SEQUENCE
  Synthetic Construct
AKTNDK

SEQ ID NO: 9037 - protein, 6 aa, ARTIFICIAL SEQUENCE
  Synthetic Construct
AKTNEK

SEQ ID NO: 9038 - protein, 6 aa, ARTIFICIAL SEQUENCE
  Synthetic Construct
AKTNFK

SEQ ID NO: 9039 - protein, 6 aa, ARTIFICIAL SEQUENCE
  Synthetic Construct
AKTNGK

SEQ ID NO: 9040 - protein, 6 aa, ARTIFICIAL SEQUENCE
  Synthetic Construct
AKTNHK

SEQ ID NO: 9041 - protein, 6 aa, ARTIFICIAL SEQUENCE
  Synthetic Construct
AKTNIK

SEQ ID NO: 9042 - protein, 6 aa, ARTIFICIAL SEQUENCE
  Synthetic Construct
AKTNLK

SEQ ID NO: 9043 - protein, 6 aa, ARTIFICIAL SEQUENCE
  Synthetic Construct
AKTNNK

SEQ ID NO: 9044 - protein, 6 aa, ARTIFICIAL SEQUENCE
  Synthetic Construct
AKTNQK

SEQ ID NO: 9045 - protein, 6 aa, ARTIFICIAL SEQUENCE
  Synthetic Construct
AKTNRK

SEQ ID NO: 9046 - protein, 6 aa, ARTIFICIAL SEQUENCE
  Synthetic Construct
AKTNSK

SEQ ID NO: 9047 - protein, 6 aa, ARTIFICIAL SEQUENCE
  Synthetic Construct
AKTNTK

SEQ ID NO: 9048 - protein, 6 aa, ARTIFICIAL SEQUENCE
  Synthetic Construct
AKTNYK

SEQ ID NO: 9049 - protein, 6 aa, ARTIFICIAL SEQUENCE
  Synthetic Construct
AKTQAK

SEQ ID NO: 9050 - protein, 6 aa, ARTIFICIAL SEQUENCE
  Synthetic Construct
AKTQDK

SEQ ID NO: 9051 - protein, 6 aa, ARTIFICIAL SEQUENCE
  Synthetic Construct
AKTQEK

SEQ ID NO: 9052 - protein, 6 aa, ARTIFICIAL SEQUENCE
  Synthetic Construct
AKTQFK

SEQ ID NO: 9053 - protein, 6 aa, ARTIFICIAL SEQUENCE
  Synthetic Construct
AKTQGK

SEQ ID NO: 9054 - protein, 6 aa, ARTIFICIAL SEQUENCE
  Synthetic Construct
AKTQHK

SEQ ID NO: 9055 - protein, 6 aa, ARTIFICIAL SEQUENCE
  Synthetic Construct
AKTQIK

SEQ ID NO: 9056 - protein, 6 aa, ARTIFICIAL SEQUENCE
  Synthetic Construct
AKTQLK

SEQ ID NO: 9057 - protein, 6 aa, ARTIFICIAL SEQUENCE
  Synthetic Construct
AKTQNK

SEQ ID NO: 9058 - protein, 6 aa, ARTIFICIAL SEQUENCE
  Synthetic Construct
AKTQQK

SEQ ID NO: 9059 - protein, 6 aa, ARTIFICIAL SEQUENCE
  Synthetic Construct
AKTQRK

SEQ ID NO: 9060 - protein, 6 aa, ARTIFICIAL SEQUENCE
  Synthetic Construct
AKTQSK

SEQ ID NO: 9061 - protein, 6 aa, ARTIFICIAL SEQUENCE
  Synthetic Construct
AKTQTK

SEQ ID NO: 9062 - protein, 6 aa, ARTIFICIAL SEQUENCE
  Synthetic Construct
AKTQYK

SEQ ID NO: 9063 - protein, 6 aa, ARTIFICIAL SEQUENCE
  Synthetic Construct
AKTRAK

SEQ ID NO: 9064 - protein, 6 aa, ARTIFICIAL SEQUENCE
  Synthetic Construct
AKTRDK

SEQ ID NO: 9065 - protein, 6 aa, ARTIFICIAL SEQUENCE
  Synthetic Construct
AKTREK

SEQ ID NO: 9066 - protein, 6 aa, ARTIFICIAL SEQUENCE
  Synthetic Construct
AKTRFK

SEQ ID NO: 9067 - protein, 6 aa, ARTIFICIAL SEQUENCE
  Synthetic Construct
AKTRGK

SEQ ID NO: 9068 - protein, 6 aa, ARTIFICIAL SEQUENCE
  Synthetic Construct
AKTRHK

SEQ ID NO: 9069 - protein, 6 aa, ARTIFICIAL SEQUENCE
  Synthetic Construct
AKTRIK

SEQ ID NO: 9070 - protein, 6 aa, ARTIFICIAL SEQUENCE
  Synthetic Construct
AKTRLK

SEQ ID NO: 9071 - protein, 6 aa, ARTIFICIAL SEQUENCE
  Synthetic Construct
AKTRNK

SEQ ID NO: 9072 - protein, 6 aa, ARTIFICIAL SEQUENCE
  Synthetic Construct
AKTRQK

SEQ ID NO: 9073 - protein, 6 aa, ARTIFICIAL SEQUENCE
  Synthetic Construct
AKTRRK

SEQ ID NO: 9074 - protein, 6 aa, ARTIFICIAL SEQUENCE
  Synthetic Construct
AKTRSK

SEQ ID NO: 9075 - protein, 6 aa, ARTIFICIAL SEQUENCE
  Synthetic Construct
AKTRTK

SEQ ID NO: 9076 - protein, 6 aa, ARTIFICIAL SEQUENCE
  Synthetic Construct
AKTRYK

SEQ ID NO: 9077 - protein, 6 aa, ARTIFICIAL SEQUENCE
  Synthetic Construct
AKTSAK

SEQ ID NO: 9078 - protein, 6 aa, ARTIFICIAL SEQUENCE
  Synthetic Construct
AKTSDK

SEQ ID NO: 9079 - protein, 6 aa, ARTIFICIAL SEQUENCE
  Synthetic Construct
AKTSEK

SEQ ID NO: 9080 - protein, 6 aa, ARTIFICIAL SEQUENCE
  Synthetic Construct
AKTSFK

SEQ ID NO: 9081 - protein, 6 aa, ARTIFICIAL SEQUENCE
  Synthetic Construct
AKTSGK

SEQ ID NO: 9082 - protein, 6 aa, ARTIFICIAL SEQUENCE
  Synthetic Construct
AKTSHK

SEQ ID NO: 9083 - protein, 6 aa, ARTIFICIAL SEQUENCE
  Synthetic Construct
AKTSIK

SEQ ID NO: 9084 - protein, 6 aa, ARTIFICIAL SEQUENCE
  Synthetic Construct
AKTSLK

SEQ ID NO: 9085 - protein, 6 aa, ARTIFICIAL SEQUENCE
  Synthetic Construct
AKTSNK

SEQ ID NO: 9086 - protein, 6 aa, ARTIFICIAL SEQUENCE
  Synthetic Construct
AKTSQK

SEQ ID NO: 9087 - protein, 6 aa, ARTIFICIAL SEQUENCE
  Synthetic Construct
AKTSRK

SEQ ID NO: 9088 - protein, 6 aa, ARTIFICIAL SEQUENCE
  Synthetic Construct
AKTSSK

SEQ ID NO: 9089 - protein, 6 aa, ARTIFICIAL SEQUENCE
  Synthetic Construct
AKTSTK

SEQ ID NO: 9090 - protein, 6 aa, ARTIFICIAL SEQUENCE
  Synthetic Construct
AKTSYK

SEQ ID NO: 9091 - protein, 6 aa, ARTIFICIAL SEQUENCE
  Synthetic Construct
AKTTAK

SEQ ID NO: 9092 - protein, 6 aa, ARTIFICIAL SEQUENCE
  Synthetic Construct
AKTTDK

SEQ ID NO: 9093 - protein, 6 aa, ARTIFICIAL SEQUENCE
  Synthetic Construct
AKTTEK

SEQ ID NO: 9094 - protein, 6 aa, ARTIFICIAL SEQUENCE
  Synthetic Construct
AKTTFK

SEQ ID NO: 9095 - protein, 6 aa, ARTIFICIAL SEQUENCE
  Synthetic Construct
AKTTGK

SEQ ID NO: 9096 - protein, 6 aa, ARTIFICIAL SEQUENCE
  Synthetic Construct
AKTTHK

SEQ ID NO: 9097 - protein, 6 aa, ARTIFICIAL SEQUENCE
  Synthetic Construct
AKTTIK

SEQ ID NO: 9098 - protein, 6 aa, ARTIFICIAL SEQUENCE
  Synthetic Construct
AKTTLK

SEQ ID NO: 9099 - protein, 6 aa, ARTIFICIAL SEQUENCE
  Synthetic Construct
AKTTNK

SEQ ID NO: 9100 - protein, 6 aa, ARTIFICIAL SEQUENCE
  Synthetic Construct
AKTTQK

SEQ ID NO: 9101 - protein, 6 aa, ARTIFICIAL SEQUENCE
  Synthetic Construct
AKTTRK

SEQ ID NO: 9102 - protein, 6 aa, ARTIFICIAL SEQUENCE
  Synthetic Construct
AKTTSK

SEQ ID NO: 9103 - protein, 6 aa, ARTIFICIAL SEQUENCE
  Synthetic Construct
AKTTTK

SEQ ID NO: 9104 - protein, 6 aa, ARTIFICIAL SEQUENCE
  Synthetic Construct
AKTTYK

SEQ ID NO: 9105 - protein, 6 aa, ARTIFICIAL SEQUENCE
  Synthetic Construct
AKTYAK

SEQ ID NO: 9106 - protein, 6 aa, ARTIFICIAL SEQUENCE
  Synthetic Construct
AKTYDK

SEQ ID NO: 9107 - protein, 6 aa, ARTIFICIAL SEQUENCE
  Synthetic Construct
AKTYEK

SEQ ID NO: 9108 - protein, 6 aa, ARTIFICIAL SEQUENCE
  Synthetic Construct
AKTYFK

SEQ ID NO: 9109 - protein, 6 aa, ARTIFICIAL SEQUENCE
  Synthetic Construct
AKTYGK

SEQ ID NO: 9110 - protein, 6 aa, ARTIFICIAL SEQUENCE
  Synthetic Construct
AKTYHK

SEQ ID NO: 9111 - protein, 6 aa, ARTIFICIAL SEQUENCE
  Synthetic Construct
AKTYIK

SEQ ID NO: 9112 - protein, 6 aa, ARTIFICIAL SEQUENCE
  Synthetic Construct
AKTYLK

SEQ ID NO: 9113 - protein, 6 aa, ARTIFICIAL SEQUENCE
  Synthetic Construct
AKTYNK

SEQ ID NO: 9114 - protein, 6 aa, ARTIFICIAL SEQUENCE
  Synthetic Construct
AKTYQK

SEQ ID NO: 9115 - protein, 6 aa, ARTIFICIAL SEQUENCE
  Synthetic Construct
AKTYRK

SEQ ID NO: 9116 - protein, 6 aa, ARTIFICIAL SEQUENCE
  Synthetic Construct
AKTYSK

SEQ ID NO: 9117 - protein, 6 aa, ARTIFICIAL SEQUENCE
  Synthetic Construct
AKTYTK

SEQ ID NO: 9118 - protein, 6 aa, ARTIFICIAL SEQUENCE
  Synthetic Construct
AKTYYK

SEQ ID NO: 9119 - protein, 6 aa, ARTIFICIAL SEQUENCE
  Synthetic Construct
AKYAAK

SEQ ID NO: 9120 - protein, 6 aa, ARTIFICIAL SEQUENCE
  Synthetic Construct
AKYADK

SEQ ID NO: 9121 - protein, 6 aa, ARTIFICIAL SEQUENCE
  Synthetic Construct
AKYAEK

SEQ ID NO: 9122 - protein, 6 aa, ARTIFICIAL SEQUENCE
  Synthetic Construct
AKYAFK

SEQ ID NO: 9123 - protein, 6 aa, ARTIFICIAL SEQUENCE
  Synthetic Construct
AKYAGK

SEQ ID NO: 9124 - protein, 6 aa, ARTIFICIAL SEQUENCE
  Synthetic Construct
AKYAHK

SEQ ID NO: 9125 - protein, 6 aa, ARTIFICIAL SEQUENCE
  Synthetic Construct
AKYAIK

SEQ ID NO: 9126 - protein, 6 aa, ARTIFICIAL SEQUENCE
  Synthetic Construct
AKYALK

SEQ ID NO: 9127 - protein, 6 aa, ARTIFICIAL SEQUENCE
  Synthetic Construct
AKYANK

SEQ ID NO: 9128 - protein, 6 aa, ARTIFICIAL SEQUENCE
  Synthetic Construct
AKYAQK

SEQ ID NO: 9129 - protein, 6 aa, ARTIFICIAL SEQUENCE
  Synthetic Construct
AKYARK

SEQ ID NO: 9130 - protein, 6 aa, ARTIFICIAL SEQUENCE
  Synthetic Construct
AKYASK

SEQ ID NO: 9131 - protein, 6 aa, ARTIFICIAL SEQUENCE
  Synthetic Construct
AKYATK

SEQ ID NO: 9132 - protein, 6 aa, ARTIFICIAL SEQUENCE
  Synthetic Construct
AKYAYK

SEQ ID NO: 9133 - protein, 6 aa, ARTIFICIAL SEQUENCE
  Synthetic Construct
AKYDAK

SEQ ID NO: 9134 - protein, 6 aa, ARTIFICIAL SEQUENCE
  Synthetic Construct
AKYDDK

SEQ ID NO: 9135 - protein, 6 aa, ARTIFICIAL SEQUENCE
  Synthetic Construct
AKYDEK

SEQ ID NO: 9136 - protein, 6 aa, ARTIFICIAL SEQUENCE
  Synthetic Construct
AKYDFK

SEQ ID NO: 9137 - protein, 6 aa, ARTIFICIAL SEQUENCE
  Synthetic Construct
AKYDGK

SEQ ID NO: 9138 - protein, 6 aa, ARTIFICIAL SEQUENCE
  Synthetic Construct
AKYDHK

SEQ ID NO: 9139 - protein, 6 aa, ARTIFICIAL SEQUENCE
  Synthetic Construct
AKYDIK

SEQ ID NO: 9140 - protein, 6 aa, ARTIFICIAL SEQUENCE
  Synthetic Construct
AKYDLK

SEQ ID NO: 9141 - protein, 6 aa, ARTIFICIAL SEQUENCE
  Synthetic Construct
AKYDNK

SEQ ID NO: 9142 - protein, 6 aa, ARTIFICIAL SEQUENCE
  Synthetic Construct
AKYDQK

SEQ ID NO: 9143 - protein, 6 aa, ARTIFICIAL SEQUENCE
  Synthetic Construct
AKYDRK

SEQ ID NO: 9144 - protein, 6 aa, ARTIFICIAL SEQUENCE
  Synthetic Construct
AKYDSK

SEQ ID NO: 9145 - protein, 6 aa, ARTIFICIAL SEQUENCE
  Synthetic Construct
AKYDTK

SEQ ID NO: 9146 - protein, 6 aa, ARTIFICIAL SEQUENCE
  Synthetic Construct
AKYDYK

SEQ ID NO: 9147 - protein, 6 aa, ARTIFICIAL SEQUENCE
  Synthetic Construct
AKYEAK

SEQ ID NO: 9148 - protein, 6 aa, ARTIFICIAL SEQUENCE
  Synthetic Construct
AKYEDK

SEQ ID NO: 9149 - protein, 6 aa, ARTIFICIAL SEQUENCE
  Synthetic Construct
AKYEEK

SEQ ID NO: 9150 - protein, 6 aa, ARTIFICIAL SEQUENCE
  Synthetic Construct
AKYEFK

SEQ ID NO: 9151 - protein, 6 aa, ARTIFICIAL SEQUENCE
  Synthetic Construct
AKYEGK

SEQ ID NO: 9152 - protein, 6 aa, ARTIFICIAL SEQUENCE
  Synthetic Construct
AKYEHK

SEQ ID NO: 9153 - protein, 6 aa, ARTIFICIAL SEQUENCE
  Synthetic Construct
AKYEIK

SEQ ID NO: 9154 - protein, 6 aa, ARTIFICIAL SEQUENCE
  Synthetic Construct
AKYELK

SEQ ID NO: 9155 - protein, 6 aa, ARTIFICIAL SEQUENCE
  Synthetic Construct
AKYENK

SEQ ID NO: 9156 - protein, 6 aa, ARTIFICIAL SEQUENCE
  Synthetic Construct
AKYEQK

SEQ ID NO: 9157 - protein, 6 aa, ARTIFICIAL SEQUENCE
  Synthetic Construct
AKYERK

SEQ ID NO: 9158 - protein, 6 aa, ARTIFICIAL SEQUENCE
  Synthetic Construct
AKYESK

SEQ ID NO: 9159 - protein, 6 aa, ARTIFICIAL SEQUENCE
  Synthetic Construct
AKYETK

SEQ ID NO: 9160 - protein, 6 aa, ARTIFICIAL SEQUENCE
  Synthetic Construct
AKYEYK

SEQ ID NO: 9161 - protein, 6 aa, ARTIFICIAL SEQUENCE
  Synthetic Construct
AKYFAK

SEQ ID NO: 9162 - protein, 6 aa, ARTIFICIAL SEQUENCE
  Synthetic Construct
AKYFDK

SEQ ID NO: 9163 - protein, 6 aa, ARTIFICIAL SEQUENCE
  Synthetic Construct
AKYFEK

SEQ ID NO: 9164 - protein, 6 aa, ARTIFICIAL SEQUENCE
  Synthetic Construct
AKYFFK

SEQ ID NO: 9165 - protein, 6 aa, ARTIFICIAL SEQUENCE
  Synthetic Construct
AKYFGK

SEQ ID NO: 9166 - protein, 6 aa, ARTIFICIAL SEQUENCE
  Synthetic Construct
AKYFHK

SEQ ID NO: 9167 - protein, 6 aa, ARTIFICIAL SEQUENCE
  Synthetic Construct
AKYFIK

SEQ ID NO: 9168 - protein, 6 aa, ARTIFICIAL SEQUENCE
  Synthetic Construct
AKYFLK

SEQ ID NO: 9169 - protein, 6 aa, ARTIFICIAL SEQUENCE
  Synthetic Construct
AKYFNK

SEQ ID NO: 9170 - protein, 6 aa, ARTIFICIAL SEQUENCE
  Synthetic Construct
AKYFQK

SEQ ID NO: 9171 - protein, 6 aa, ARTIFICIAL SEQUENCE
  Synthetic Construct
AKYFRK

SEQ ID NO: 9172 - protein, 6 aa, ARTIFICIAL SEQUENCE
  Synthetic Construct
AKYFSK

SEQ ID NO: 9173 - protein, 6 aa, ARTIFICIAL SEQUENCE
  Synthetic Construct
AKYFTK

SEQ ID NO: 9174 - protein, 6 aa, ARTIFICIAL SEQUENCE
  Synthetic Construct
AKYFYK

SEQ ID NO: 9175 - protein, 6 aa, ARTIFICIAL SEQUENCE
  Synthetic Construct
AKYGAK

SEQ ID NO: 9176 - protein, 6 aa, ARTIFICIAL SEQUENCE
  Synthetic Construct
AKYGDK

SEQ ID NO: 9177 - protein, 6 aa, ARTIFICIAL SEQUENCE
  Synthetic Construct
AKYGEK

SEQ ID NO: 9178 - protein, 6 aa, ARTIFICIAL SEQUENCE
  Synthetic Construct
AKYGFK

SEQ ID NO: 9179 - protein, 6 aa, ARTIFICIAL SEQUENCE
  Synthetic Construct
AKYGGK

SEQ ID NO: 9180 - protein, 6 aa, ARTIFICIAL SEQUENCE
  Synthetic Construct
AKYGHK

SEQ ID NO: 9181 - protein, 6 aa, ARTIFICIAL SEQUENCE
  Synthetic Construct
AKYGIK

SEQ ID NO: 9182 - protein, 6 aa, ARTIFICIAL SEQUENCE
  Synthetic Construct
AKYGLK

SEQ ID NO: 9183 - protein, 6 aa, ARTIFICIAL SEQUENCE
  Synthetic Construct
AKYGNK

SEQ ID NO: 9184 - protein, 6 aa, ARTIFICIAL SEQUENCE
  Synthetic Construct
AKYGQK

SEQ ID NO: 9185 - protein, 6 aa, ARTIFICIAL SEQUENCE
  Synthetic Construct
AKYGRK

SEQ ID NO: 9186 - protein, 6 aa, ARTIFICIAL SEQUENCE
  Synthetic Construct
AKYGSK

SEQ ID NO: 9187 - protein, 6 aa, ARTIFICIAL SEQUENCE
  Synthetic Construct
AKYGTK

SEQ ID NO: 9188 - protein, 6 aa, ARTIFICIAL SEQUENCE
  Synthetic Construct
AKYGYK

SEQ ID NO: 9189 - protein, 6 aa, ARTIFICIAL SEQUENCE
  Synthetic Construct
AKYHAK

SEQ ID NO: 9190 - protein, 6 aa, ARTIFICIAL SEQUENCE
  Synthetic Construct
AKYHDK

SEQ ID NO: 9191 - protein, 6 aa, ARTIFICIAL SEQUENCE
  Synthetic Construct
AKYHEK

SEQ ID NO: 9192 - protein, 6 aa, ARTIFICIAL SEQUENCE
  Synthetic Construct
AKYHFK

SEQ ID NO: 9193 - protein, 6 aa, ARTIFICIAL SEQUENCE
  Synthetic Construct
AKYHGK

SEQ ID NO: 9194 - protein, 6 aa, ARTIFICIAL SEQUENCE
  Synthetic Construct
AKYHHK

SEQ ID NO: 9195 - protein, 6 aa, ARTIFICIAL SEQUENCE
  Synthetic Construct
AKYHIK

SEQ ID NO: 9196 - protein, 6 aa, ARTIFICIAL SEQUENCE
  Synthetic Construct
AKYHLK

SEQ ID NO: 9197 - protein, 6 aa, ARTIFICIAL SEQUENCE
  Synthetic Construct
AKYHNK

SEQ ID NO: 9198 - protein, 6 aa, ARTIFICIAL SEQUENCE
  Synthetic Construct
AKYHQK

SEQ ID NO: 9199 - protein, 6 aa, ARTIFICIAL SEQUENCE
  Synthetic Construct
AKYHRK

SEQ ID NO: 9200 - protein, 6 aa, ARTIFICIAL SEQUENCE
  Synthetic Construct
AKYHSK

SEQ ID NO: 9201 - protein, 6 aa, ARTIFICIAL SEQUENCE
  Synthetic Construct
AKYHTK

SEQ ID NO: 9202 - protein, 6 aa, ARTIFICIAL SEQUENCE
  Synthetic Construct
AKYHYK

SEQ ID NO: 9203 - protein, 6 aa, ARTIFICIAL SEQUENCE
  Synthetic Construct
AKYIAK

SEQ ID NO: 9204 - protein, 6 aa, ARTIFICIAL SEQUENCE
  Synthetic Construct
AKYIDK

SEQ ID NO: 9205 - protein, 6 aa, ARTIFICIAL SEQUENCE
  Synthetic Construct
AKYIEK

SEQ ID NO: 9206 - protein, 6 aa, ARTIFICIAL SEQUENCE
  Synthetic Construct
AKYIFK

SEQ ID NO: 9207 - protein, 6 aa, ARTIFICIAL SEQUENCE
  Synthetic Construct
AKYIGK

SEQ ID NO: 9208 - protein, 6 aa, ARTIFICIAL SEQUENCE
  Synthetic Construct
AKYIHK

SEQ ID NO: 9209 - protein, 6 aa, ARTIFICIAL SEQUENCE
  Synthetic Construct
AKYIIK

SEQ ID NO: 9210 - protein, 6 aa, ARTIFICIAL SEQUENCE
  Synthetic Construct
AKYILK

SEQ ID NO: 9211 - protein, 6 aa, ARTIFICIAL SEQUENCE
  Synthetic Construct
AKYINK

SEQ ID NO: 9212 - protein, 6 aa, ARTIFICIAL SEQUENCE
  Synthetic Construct
AKYIQK

SEQ ID NO: 9213 - protein, 6 aa, ARTIFICIAL SEQUENCE
  Synthetic Construct
AKYIRK

SEQ ID NO: 9214 - protein, 6 aa, ARTIFICIAL SEQUENCE
  Synthetic Construct
AKYISK

SEQ ID NO: 9215 - protein, 6 aa, ARTIFICIAL SEQUENCE
  Synthetic Construct
AKYITK

SEQ ID NO: 9216 - protein, 6 aa, ARTIFICIAL SEQUENCE
  Synthetic Construct
AKYIYK

SEQ ID NO: 9217 - protein, 6 aa, ARTIFICIAL SEQUENCE
  Synthetic Construct
AKYLAK

SEQ ID NO: 9218 - protein, 6 aa, ARTIFICIAL SEQUENCE
  Synthetic Construct
AKYLDK

SEQ ID NO: 9219 - protein, 6 aa, ARTIFICIAL SEQUENCE
  Synthetic Construct
AKYLEK

SEQ ID NO: 9220 - protein, 6 aa, ARTIFICIAL SEQUENCE
  Synthetic Construct
AKYLFK

SEQ ID NO: 9221 - protein, 6 aa, ARTIFICIAL SEQUENCE
  Synthetic Construct
AKYLGK

SEQ ID NO: 9222 - protein, 6 aa, ARTIFICIAL SEQUENCE
  Synthetic Construct
AKYLHK

SEQ ID NO: 9223 - protein, 6 aa, ARTIFICIAL SEQUENCE
  Synthetic Construct
AKYLIK

SEQ ID NO: 9224 - protein, 6 aa, ARTIFICIAL SEQUENCE
  Synthetic Construct
AKYLLK

SEQ ID NO: 9225 - protein, 6 aa, ARTIFICIAL SEQUENCE
  Synthetic Construct
AKYLNK

SEQ ID NO: 9226 - protein, 6 aa, ARTIFICIAL SEQUENCE
  Synthetic Construct
AKYLQK

SEQ ID NO: 9227 - protein, 6 aa, ARTIFICIAL SEQUENCE
  Synthetic Construct
AKYLRK

SEQ ID NO: 9228 - protein, 6 aa, ARTIFICIAL SEQUENCE
  Synthetic Construct
AKYLSK

SEQ ID NO: 9229 - protein, 6 aa, ARTIFICIAL SEQUENCE
  Synthetic Construct
AKYLTK

SEQ ID NO: 9230 - protein, 6 aa, ARTIFICIAL SEQUENCE
  Synthetic Construct
AKYLYK

SEQ ID NO: 9231 - protein, 6 aa, ARTIFICIAL SEQUENCE
  Synthetic Construct
AKYNAK

SEQ ID NO: 9232 - protein, 6 aa, ARTIFICIAL SEQUENCE
  Synthetic Construct
AKYNDK

SEQ ID NO: 9233 - protein, 6 aa, ARTIFICIAL SEQUENCE
  Synthetic Construct
AKYNEK

SEQ ID NO: 9234 - protein, 6 aa, ARTIFICIAL SEQUENCE
  Synthetic Construct
AKYNFK

SEQ ID NO: 9235 - protein, 6 aa, ARTIFICIAL SEQUENCE
  Synthetic Construct
AKYNGK

SEQ ID NO: 9236 - protein, 6 aa, ARTIFICIAL SEQUENCE
  Synthetic Construct
AKYNHK

SEQ ID NO: 9237 - protein, 6 aa, ARTIFICIAL SEQUENCE
  Synthetic Construct
AKYNIK

SEQ ID NO: 9238 - protein, 6 aa, ARTIFICIAL SEQUENCE
  Synthetic Construct
AKYNLK

SEQ ID NO: 9239 - protein, 6 aa, ARTIFICIAL SEQUENCE
  Synthetic Construct
AKYNNK

SEQ ID NO: 9240 - protein, 6 aa, ARTIFICIAL SEQUENCE
  Synthetic Construct
AKYNQK

SEQ ID NO: 9241 - protein, 6 aa, ARTIFICIAL SEQUENCE
  Synthetic Construct
AKYNRK

SEQ ID NO: 9242 - protein, 6 aa, ARTIFICIAL SEQUENCE
  Synthetic Construct
AKYNSK

SEQ ID NO: 9243 - protein, 6 aa, ARTIFICIAL SEQUENCE
  Synthetic Construct
AKYNTK

SEQ ID NO: 9244 - protein, 6 aa, ARTIFICIAL SEQUENCE
  Synthetic Construct
AKYNYK

SEQ ID NO: 9245 - protein, 6 aa, ARTIFICIAL SEQUENCE
  Synthetic Construct
AKYQAK

SEQ ID NO: 9246 - protein, 6 aa, ARTIFICIAL SEQUENCE
  Synthetic Construct
AKYQDK

SEQ ID NO: 9247 - protein, 6 aa, ARTIFICIAL SEQUENCE
  Synthetic Construct
AKYQEK

SEQ ID NO: 9248 - protein, 6 aa, ARTIFICIAL SEQUENCE
  Synthetic Construct
AKYQFK

SEQ ID NO: 9249 - protein, 6 aa, ARTIFICIAL SEQUENCE
  Synthetic Construct
AKYQGK

SEQ ID NO: 9250 - protein, 6 aa, ARTIFICIAL SEQUENCE
  Synthetic Construct
AKYQHK

SEQ ID NO: 9251 - protein, 6 aa, ARTIFICIAL SEQUENCE
  Synthetic Construct
AKYQIK

SEQ ID NO: 9252 - protein, 6 aa, ARTIFICIAL SEQUENCE
  Synthetic Construct
AKYQLK

SEQ ID NO: 9253 - protein, 6 aa, ARTIFICIAL SEQUENCE
  Synthetic Construct
AKYQNK

SEQ ID NO: 9254 - protein, 6 aa, ARTIFICIAL SEQUENCE
  Synthetic Construct
AKYQQK

SEQ ID NO: 9255 - protein, 6 aa, ARTIFICIAL SEQUENCE
  Synthetic Construct
AKYQRK

SEQ ID NO: 9256 - protein, 6 aa, ARTIFICIAL SEQUENCE
  Synthetic Construct
AKYQSK

SEQ ID NO: 9257 - protein, 6 aa, ARTIFICIAL SEQUENCE
  Synthetic Construct
AKYQTK

SEQ ID NO: 9258 - protein, 6 aa, ARTIFICIAL SEQUENCE
  Synthetic Construct
AKYQYK

SEQ ID NO: 9259 - protein, 6 aa, ARTIFICIAL SEQUENCE
  Synthetic Construct
AKYRAK

SEQ ID NO: 9260 - protein, 6 aa, ARTIFICIAL SEQUENCE
  Synthetic Construct
AKYRDK

SEQ ID NO: 9261 - protein, 6 aa, ARTIFICIAL SEQUENCE
  Synthetic Construct
AKYREK

SEQ ID NO: 9262 - protein, 6 aa, ARTIFICIAL SEQUENCE
  Synthetic Construct
AKYRFK

SEQ ID NO: 9263 - protein, 6 aa, ARTIFICIAL SEQUENCE
  Synthetic Construct
AKYRGK

SEQ ID NO: 9264 - protein, 6 aa, ARTIFICIAL SEQUENCE
  Synthetic Construct
AKYRHK

SEQ ID NO: 9265 - protein, 6 aa, ARTIFICIAL SEQUENCE
  Synthetic Construct
AKYRIK

SEQ ID NO: 9266 - protein, 6 aa, ARTIFICIAL SEQUENCE
  Synthetic Construct
AKYRLK

SEQ ID NO: 9267 - protein, 6 aa, ARTIFICIAL SEQUENCE
  Synthetic Construct
AKYRNK

SEQ ID NO: 9268 - protein, 6 aa, ARTIFICIAL SEQUENCE
  Synthetic Construct
AKYRQK

SEQ ID NO: 9269 - protein, 6 aa, ARTIFICIAL SEQUENCE
  Synthetic Construct
AKYRRK

SEQ ID NO: 9270 - protein, 6 aa, ARTIFICIAL SEQUENCE
  Synthetic Construct
AKYRSK

SEQ ID NO: 9271 - protein, 6 aa, ARTIFICIAL SEQUENCE
  Synthetic Construct
AKYRTK

SEQ ID NO: 9272 - protein, 6 aa, ARTIFICIAL SEQUENCE
  Synthetic Construct
AKYRYK

SEQ ID NO: 9273 - protein, 6 aa, ARTIFICIAL SEQUENCE
  Synthetic Construct
AKYSAK

SEQ ID NO: 9274 - protein, 6 aa, ARTIFICIAL SEQUENCE
  Synthetic Construct
AKYSDK

SEQ ID NO: 9275 - protein, 6 aa, ARTIFICIAL SEQUENCE
  Synthetic Construct
AKYSEK

SEQ ID NO: 9276 - protein, 6 aa, ARTIFICIAL SEQUENCE
  Synthetic Construct
AKYSFK

SEQ ID NO: 9277 - protein, 6 aa, ARTIFICIAL SEQUENCE
  Synthetic Construct
AKYSGK

SEQ ID NO: 9278 - protein, 6 aa, ARTIFICIAL SEQUENCE
  Synthetic Construct
AKYSHK

SEQ ID NO: 9279 - protein, 6 aa, ARTIFICIAL SEQUENCE
  Synthetic Construct
AKYSIK

SEQ ID NO: 9280 - protein, 6 aa, ARTIFICIAL SEQUENCE
  Synthetic Construct
AKYSLK

SEQ ID NO: 9281 - protein, 6 aa, ARTIFICIAL SEQUENCE
  Synthetic Construct
AKYSNK

SEQ ID NO: 9282 - protein, 6 aa, ARTIFICIAL SEQUENCE
  Synthetic Construct
AKYSQK

SEQ ID NO: 9283 - protein, 6 aa, ARTIFICIAL SEQUENCE
  Synthetic Construct
AKYSRK

SEQ ID NO: 9284 - protein, 6 aa, ARTIFICIAL SEQUENCE
  Synthetic Construct
AKYSSK

SEQ ID NO: 9285 - protein, 6 aa, ARTIFICIAL SEQUENCE
  Synthetic Construct
AKYSTK

SEQ ID NO: 9286 - protein, 6 aa, ARTIFICIAL SEQUENCE
  Synthetic Construct
AKYSYK

SEQ ID NO: 9287 - protein, 6 aa, ARTIFICIAL SEQUENCE
  Synthetic Construct
AKYTAK

SEQ ID NO: 9288 - protein, 6 aa, ARTIFICIAL SEQUENCE
  Synthetic Construct
AKYTDK

SEQ ID NO: 9289 - protein, 6 aa, ARTIFICIAL SEQUENCE
  Synthetic Construct
AKYTEK

SEQ ID NO: 9290 - protein, 6 aa, ARTIFICIAL SEQUENCE
  Synthetic Construct
AKYTFK

SEQ ID NO: 9291 - protein, 6 aa, ARTIFICIAL SEQUENCE
  Synthetic Construct
AKYTGK

SEQ ID NO: 9292 - protein, 6 aa, ARTIFICIAL SEQUENCE
  Synthetic Construct
AKYTHK

SEQ ID NO: 9293 - protein, 6 aa, ARTIFICIAL SEQUENCE
  Synthetic Construct
AKYTIK

SEQ ID NO: 9294 - protein, 6 aa, ARTIFICIAL SEQUENCE
  Synthetic Construct
AKYTLK

SEQ ID NO: 9295 - protein, 6 aa, ARTIFICIAL SEQUENCE
  Synthetic Construct
AKYTNK

SEQ ID NO: 9296 - protein, 6 aa, ARTIFICIAL SEQUENCE
  Synthetic Construct
AKYTQK

SEQ ID NO: 9297 - protein, 6 aa, ARTIFICIAL SEQUENCE
  Synthetic Construct
AKYTRK

SEQ ID NO: 9298 - protein, 6 aa, ARTIFICIAL SEQUENCE
  Synthetic Construct
AKYTSK

SEQ ID NO: 9299 - protein, 6 aa, ARTIFICIAL SEQUENCE
  Synthetic Construct
AKYTTK

SEQ ID NO: 9300 - protein, 6 aa, ARTIFICIAL SEQUENCE
  Synthetic Construct
AKYTYK

SEQ ID NO: 9301 - protein, 6 aa, ARTIFICIAL SEQUENCE
  Synthetic Construct
AKYYAK

SEQ ID NO: 9302 - protein, 6 aa, ARTIFICIAL SEQUENCE
  Synthetic Construct
AKYYDK

SEQ ID NO: 9303 - protein, 6 aa, ARTIFICIAL SEQUENCE
  Synthetic Construct
AKYYEK

SEQ ID NO: 9304 - protein, 6 aa, ARTIFICIAL SEQUENCE
  Synthetic Construct
AKYYFK

SEQ ID NO: 9305 - protein, 6 aa, ARTIFICIAL SEQUENCE
  Synthetic Construct
AKYYGK

SEQ ID NO: 9306 - protein, 6 aa, ARTIFICIAL SEQUENCE
  Synthetic Construct
AKYYHK

SEQ ID NO: 9307 - protein, 6 aa, ARTIFICIAL SEQUENCE
  Synthetic Construct
AKYYIK

SEQ ID NO: 9308 - protein, 6 aa, ARTIFICIAL SEQUENCE
  Synthetic Construct
AKYYLK

SEQ ID NO: 9309 - protein, 6 aa, ARTIFICIAL SEQUENCE
  Synthetic Construct
AKYYNK

SEQ ID NO: 9310 - protein, 6 aa, ARTIFICIAL SEQUENCE
  Synthetic Construct
AKYYQK

SEQ ID NO: 9311 - protein, 6 aa, ARTIFICIAL SEQUENCE
  Synthetic Construct
AKYYRK

SEQ ID NO: 9312 - protein, 6 aa, ARTIFICIAL SEQUENCE
  Synthetic Construct
AKYYSK

SEQ ID NO: 9313 - protein, 6 aa, ARTIFICIAL SEQUENCE
  Synthetic Construct
AKYYTK

SEQ ID NO: 9314 - protein, 6 aa, ARTIFICIAL SEQUENCE
  Synthetic Construct
AKYYYK

SEQ ID NO: 9315 - protein, 6 aa, ARTIFICIAL SEQUENCE
  Synthetic Construct
EKAAAK

SEQ ID NO: 9316 - protein, 6 aa, ARTIFICIAL SEQUENCE
  Synthetic Construct
EKAADK

SEQ ID NO: 9317 - protein, 6 aa, ARTIFICIAL SEQUENCE
  Synthetic Construct
EKAAEK

SEQ ID NO: 9318 - protein, 6 aa, ARTIFICIAL SEQUENCE
  Synthetic Construct
EKAAFK

SEQ ID NO: 9319 - protein, 6 aa, ARTIFICIAL SEQUENCE
  Synthetic Construct
EKAAGK

SEQ ID NO: 9320 - protein, 6 aa, ARTIFICIAL SEQUENCE
  Synthetic Construct
EKAAHK

SEQ ID NO: 9321 - protein, 6 aa, ARTIFICIAL SEQUENCE
  Synthetic Construct
EKAAIK

SEQ ID NO: 9322 - protein, 6 aa, ARTIFICIAL SEQUENCE
  Synthetic Construct
EKAALK

SEQ ID NO: 9323 - protein, 6 aa, ARTIFICIAL SEQUENCE
  Synthetic Construct
EKAANK

SEQ ID NO: 9324 - protein, 6 aa, ARTIFICIAL SEQUENCE
  Synthetic Construct
EKAAQK

SEQ ID NO: 9325 - protein, 6 aa, ARTIFICIAL SEQUENCE
  Synthetic Construct
EKAARK

SEQ ID NO: 9326 - protein, 6 aa, ARTIFICIAL SEQUENCE
  Synthetic Construct
EKAASK

SEQ ID NO: 9327 - protein, 6 aa, ARTIFICIAL SEQUENCE
  Synthetic Construct
EKAATK

SEQ ID NO: 9328 - protein, 6 aa, ARTIFICIAL SEQUENCE
  Synthetic Construct
EKAAYK

SEQ ID NO: 9329 - protein, 6 aa, ARTIFICIAL SEQUENCE
  Synthetic Construct
EKADAK

SEQ ID NO: 9330 - protein, 6 aa, ARTIFICIAL SEQUENCE
  Synthetic Construct
EKADDK

SEQ ID NO: 9331 - protein, 6 aa, ARTIFICIAL SEQUENCE
  Synthetic Construct
EKADEK

SEQ ID NO: 9332 - protein, 6 aa, ARTIFICIAL SEQUENCE
  Synthetic Construct
EKADFK

SEQ ID NO: 9333 - protein, 6 aa, ARTIFICIAL SEQUENCE
  Synthetic Construct
EKADGK

SEQ ID NO: 9334 - protein, 6 aa, ARTIFICIAL SEQUENCE
  Synthetic Construct
EKADHK

SEQ ID NO: 9335 - protein, 6 aa, ARTIFICIAL SEQUENCE
  Synthetic Construct
EKADIK

SEQ ID NO: 9336 - protein, 6 aa, ARTIFICIAL SEQUENCE
  Synthetic Construct
EKADLK

SEQ ID NO: 9337 - protein, 6 aa, ARTIFICIAL SEQUENCE
  Synthetic Construct
EKADNK

SEQ ID NO: 9338 - protein, 6 aa, ARTIFICIAL SEQUENCE
  Synthetic Construct
EKADQK

SEQ ID NO: 9339 - protein, 6 aa, ARTIFICIAL SEQUENCE
  Synthetic Construct
EKADRK

SEQ ID NO: 9340 - protein, 6 aa, ARTIFICIAL SEQUENCE
  Synthetic Construct
EKADSK

SEQ ID NO: 9341 - protein, 6 aa, ARTIFICIAL SEQUENCE
  Synthetic Construct
EKADTK

SEQ ID NO: 9342 - protein, 6 aa, ARTIFICIAL SEQUENCE
  Synthetic Construct
EKADYK

SEQ ID NO: 9343 - protein, 6 aa, ARTIFICIAL SEQUENCE
  Synthetic Construct
EKAEAK

SEQ ID NO: 9344 - protein, 6 aa, ARTIFICIAL SEQUENCE
  Synthetic Construct
EKAEDK

SEQ ID NO: 9345 - protein, 6 aa, ARTIFICIAL SEQUENCE
  Synthetic Construct
EKAEEK

SEQ ID NO: 9346 - protein, 6 aa, ARTIFICIAL SEQUENCE
  Synthetic Construct
EKAEFK

SEQ ID NO: 9347 - protein, 6 aa, ARTIFICIAL SEQUENCE
  Synthetic Construct
EKAEGK

SEQ ID NO: 9348 - protein, 6 aa, ARTIFICIAL SEQUENCE
  Synthetic Construct
EKAEHK

SEQ ID NO: 9349 - protein, 6 aa, ARTIFICIAL SEQUENCE
  Synthetic Construct
EKAEIK

SEQ ID NO: 9350 - protein, 6 aa, ARTIFICIAL SEQUENCE
  Synthetic Construct
EKAELK

SEQ ID NO: 9351 - protein, 6 aa, ARTIFICIAL SEQUENCE
  Synthetic Construct
EKAENK

SEQ ID NO: 9352 - protein, 6 aa, ARTIFICIAL SEQUENCE
  Synthetic Construct
EKAEQK

SEQ ID NO: 9353 - protein, 6 aa, ARTIFICIAL SEQUENCE
  Synthetic Construct
EKAERK

SEQ ID NO: 9354 - protein, 6 aa, ARTIFICIAL SEQUENCE
  Synthetic Construct
EKAESK

SEQ ID NO: 9355 - protein, 6 aa, ARTIFICIAL SEQUENCE
  Synthetic Construct
EKAETK

SEQ ID NO: 9356 - protein, 6 aa, ARTIFICIAL SEQUENCE
  Synthetic Construct
EKAEYK

SEQ ID NO: 9357 - protein, 6 aa, ARTIFICIAL SEQUENCE
  Synthetic Construct
EKAFAK

SEQ ID NO: 9358 - protein, 6 aa, ARTIFICIAL SEQUENCE
  Synthetic Construct
EKAFDK

SEQ ID NO: 9359 - protein, 6 aa, ARTIFICIAL SEQUENCE
  Synthetic Construct
EKAFEK

SEQ ID NO: 9360 - protein, 6 aa, ARTIFICIAL SEQUENCE
  Synthetic Construct
EKAFFK

SEQ ID NO: 9361 - protein, 6 aa, ARTIFICIAL SEQUENCE
  Synthetic Construct
EKAFGK

SEQ ID NO: 9362 - protein, 6 aa, ARTIFICIAL SEQUENCE
  Synthetic Construct
EKAFHK

SEQ ID NO: 9363 - protein, 6 aa, ARTIFICIAL SEQUENCE
  Synthetic Construct
EKAFIK

SEQ ID NO: 9364 - protein, 6 aa, ARTIFICIAL SEQUENCE
  Synthetic Construct
EKAFLK

SEQ ID NO: 9365 - protein, 6 aa, ARTIFICIAL SEQUENCE
  Synthetic Construct
EKAFNK

SEQ ID NO: 9366 - protein, 6 aa, ARTIFICIAL SEQUENCE
  Synthetic Construct
EKAFQK

SEQ ID NO: 9367 - protein, 6 aa, ARTIFICIAL SEQUENCE
  Synthetic Construct
EKAFRK

SEQ ID NO: 9368 - protein, 6 aa, ARTIFICIAL SEQUENCE
  Synthetic Construct
EKAFSK

SEQ ID NO: 9369 - protein, 6 aa, ARTIFICIAL SEQUENCE
  Synthetic Construct
EKAFTK

SEQ ID NO: 9370 - protein, 6 aa, ARTIFICIAL SEQUENCE
  Synthetic Construct
EKAFYK

SEQ ID NO: 9371 - protein, 6 aa, ARTIFICIAL SEQUENCE
  Synthetic Construct
EKAGAK

SEQ ID NO: 9372 - protein, 6 aa, ARTIFICIAL SEQUENCE
  Synthetic Construct
EKAGDK

SEQ ID NO: 9373 - protein, 6 aa, ARTIFICIAL SEQUENCE
  Synthetic Construct
EKAGEK

SEQ ID NO: 9374 - protein, 6 aa, ARTIFICIAL SEQUENCE
  Synthetic Construct
EKAGFK

SEQ ID NO: 9375 - protein, 6 aa, ARTIFICIAL SEQUENCE
  Synthetic Construct
EKAGGK

SEQ ID NO: 9376 - protein, 6 aa, ARTIFICIAL SEQUENCE
  Synthetic Construct
EKAGHK

SEQ ID NO: 9377 - protein, 6 aa, ARTIFICIAL SEQUENCE
  Synthetic Construct
EKAGIK

SEQ ID NO: 9378 - protein, 6 aa, ARTIFICIAL SEQUENCE
  Synthetic Construct
EKAGLK

SEQ ID NO: 9379 - protein, 6 aa, ARTIFICIAL SEQUENCE
  Synthetic Construct
EKAGNK

SEQ ID NO: 9380 - protein, 6 aa, ARTIFICIAL SEQUENCE
  Synthetic Construct
EKAGQK

SEQ ID NO: 9381 - protein, 6 aa, ARTIFICIAL SEQUENCE
  Synthetic Construct
EKAGRK

SEQ ID NO: 9382 - protein, 6 aa, ARTIFICIAL SEQUENCE
  Synthetic Construct
EKAGSK

SEQ ID NO: 9383 - protein, 6 aa, ARTIFICIAL SEQUENCE
  Synthetic Construct
EKAGTK

SEQ ID NO: 9384 - protein, 6 aa, ARTIFICIAL SEQUENCE
  Synthetic Construct
EKAGYK

SEQ ID NO: 9385 - protein, 6 aa, ARTIFICIAL SEQUENCE
  Synthetic Construct
EKAHAK

SEQ ID NO: 9386 - protein, 6 aa, ARTIFICIAL SEQUENCE
  Synthetic Construct
EKAHDK

SEQ ID NO: 9387 - protein, 6 aa, ARTIFICIAL SEQUENCE
  Synthetic Construct
EKAHEK

SEQ ID NO: 9388 - protein, 6 aa, ARTIFICIAL SEQUENCE
  Synthetic Construct
EKAHFK

SEQ ID NO: 9389 - protein, 6 aa, ARTIFICIAL SEQUENCE
  Synthetic Construct
EKAHGK

SEQ ID NO: 9390 - protein, 6 aa, ARTIFICIAL SEQUENCE
  Synthetic Construct
EKAHHK

SEQ ID NO: 9391 - protein, 6 aa, ARTIFICIAL SEQUENCE
  Synthetic Construct
EKAHIK

SEQ ID NO: 9392 - protein, 6 aa, ARTIFICIAL SEQUENCE
  Synthetic Construct
EKAHLK

SEQ ID NO: 9393 - protein, 6 aa, ARTIFICIAL SEQUENCE
  Synthetic Construct
EKAHNK

SEQ ID NO: 9394 - protein, 6 aa, ARTIFICIAL SEQUENCE
  Synthetic Construct
EKAHQK

SEQ ID NO: 9395 - protein, 6 aa, ARTIFICIAL SEQUENCE
  Synthetic Construct
EKAHRK

SEQ ID NO: 9396 - protein, 6 aa, ARTIFICIAL SEQUENCE
  Synthetic Construct
EKAHSK

SEQ ID NO: 9397 - protein, 6 aa, ARTIFICIAL SEQUENCE
  Synthetic Construct
EKAHTK

SEQ ID NO: 9398 - protein, 6 aa, ARTIFICIAL SEQUENCE
  Synthetic Construct
EKAHYK

SEQ ID NO: 9399 - protein, 6 aa, ARTIFICIAL SEQUENCE
  Synthetic Construct
EKAIAK

SEQ ID NO: 9400 - protein, 6 aa, ARTIFICIAL SEQUENCE
  Synthetic Construct
EKAIDK

SEQ ID NO: 9401 - protein, 6 aa, ARTIFICIAL SEQUENCE
  Synthetic Construct
EKAIEK

SEQ ID NO: 9402 - protein, 6 aa, ARTIFICIAL SEQUENCE
  Synthetic Construct
EKAIFK

SEQ ID NO: 9403 - protein, 6 aa, ARTIFICIAL SEQUENCE
  Synthetic Construct
EKAIGK

SEQ ID NO: 9404 - protein, 6 aa, ARTIFICIAL SEQUENCE
  Synthetic Construct
EKAIHK

SEQ ID NO: 9405 - protein, 6 aa, ARTIFICIAL SEQUENCE
  Synthetic Construct
EKAIIK

SEQ ID NO: 9406 - protein, 6 aa, ARTIFICIAL SEQUENCE
  Synthetic Construct
EKAILK

SEQ ID NO: 9407 - protein, 6 aa, ARTIFICIAL SEQUENCE
  Synthetic Construct
EKAINK

SEQ ID NO: 9408 - protein, 6 aa, ARTIFICIAL SEQUENCE
  Synthetic Construct
EKAIQK

SEQ ID NO: 9409 - protein, 6 aa, ARTIFICIAL SEQUENCE
  Synthetic Construct
EKAIRK

SEQ ID NO: 9410 - protein, 6 aa, ARTIFICIAL SEQUENCE
  Synthetic Construct
EKAISK

SEQ ID NO: 9411 - protein, 6 aa, ARTIFICIAL SEQUENCE
  Synthetic Construct
EKAITK

SEQ ID NO: 9412 - protein, 6 aa, ARTIFICIAL SEQUENCE
  Synthetic Construct
EKAIYK

SEQ ID NO: 9413 - protein, 6 aa, ARTIFICIAL SEQUENCE
  Synthetic Construct
EKALAK

SEQ ID NO: 9414 - protein, 6 aa, ARTIFICIAL SEQUENCE
  Synthetic Construct
EKALDK

SEQ ID NO: 9415 - protein, 6 aa, ARTIFICIAL SEQUENCE
  Synthetic Construct
EKALEK

SEQ ID NO: 9416 - protein, 6 aa, ARTIFICIAL SEQUENCE
  Synthetic Construct
EKALFK

SEQ ID NO: 9417 - protein, 6 aa, ARTIFICIAL SEQUENCE
  Synthetic Construct
EKALGK

SEQ ID NO: 9418 - protein, 6 aa, ARTIFICIAL SEQUENCE
  Synthetic Construct
EKALHK

SEQ ID NO: 9419 - protein, 6 aa, ARTIFICIAL SEQUENCE
  Synthetic Construct
EKALIK

SEQ ID NO: 9420 - protein, 6 aa, ARTIFICIAL SEQUENCE
  Synthetic Construct
EKALLK

SEQ ID NO: 9421 - protein, 6 aa, ARTIFICIAL SEQUENCE
  Synthetic Construct
EKALNK

SEQ ID NO: 9422 - protein, 6 aa, ARTIFICIAL SEQUENCE
  Synthetic Construct
EKALQK

SEQ ID NO: 9423 - protein, 6 aa, ARTIFICIAL SEQUENCE
  Synthetic Construct
EKALRK

SEQ ID NO: 9424 - protein, 6 aa, ARTIFICIAL SEQUENCE
  Synthetic Construct
EKALSK

SEQ ID NO: 9425 - protein, 6 aa, ARTIFICIAL SEQUENCE
  Synthetic Construct
EKALTK

SEQ ID NO: 9426 - protein, 6 aa, ARTIFICIAL SEQUENCE
  Synthetic Construct
EKALYK

SEQ ID NO: 9427 - protein, 6 aa, ARTIFICIAL SEQUENCE
  Synthetic Construct
EKANAK

SEQ ID NO: 9428 - protein, 6 aa, ARTIFICIAL SEQUENCE
  Synthetic Construct
EKANDK

SEQ ID NO: 9429 - protein, 6 aa, ARTIFICIAL SEQUENCE
  Synthetic Construct
EKANEK

SEQ ID NO: 9430 - protein, 6 aa, ARTIFICIAL SEQUENCE
  Synthetic Construct
EKANFK

SEQ ID NO: 9431 - protein, 6 aa, ARTIFICIAL SEQUENCE
  Synthetic Construct
EKANGK

SEQ ID NO: 9432 - protein, 6 aa, ARTIFICIAL SEQUENCE
  Synthetic Construct
EKANHK

SEQ ID NO: 9433 - protein, 6 aa, ARTIFICIAL SEQUENCE
  Synthetic Construct
EKANIK

SEQ ID NO: 9434 - protein, 6 aa, ARTIFICIAL SEQUENCE
  Synthetic Construct
EKANLK

SEQ ID NO: 9435 - protein, 6 aa, ARTIFICIAL SEQUENCE
  Synthetic Construct
EKANNK

SEQ ID NO: 9436 - protein, 6 aa, ARTIFICIAL SEQUENCE
  Synthetic Construct
EKANQK

SEQ ID NO: 9437 - protein, 6 aa, ARTIFICIAL SEQUENCE
  Synthetic Construct
EKANRK

SEQ ID NO: 9438 - protein, 6 aa, ARTIFICIAL SEQUENCE
  Synthetic Construct
EKANSK

SEQ ID NO: 9439 - protein, 6 aa, ARTIFICIAL SEQUENCE
  Synthetic Construct
EKANTK

SEQ ID NO: 9440 - protein, 6 aa, ARTIFICIAL SEQUENCE
  Synthetic Construct
EKANYK

SEQ ID NO: 9441 - protein, 6 aa, ARTIFICIAL SEQUENCE
  Synthetic Construct
EKAQAK

SEQ ID NO: 9442 - protein, 6 aa, ARTIFICIAL SEQUENCE
  Synthetic Construct
EKAQDK

SEQ ID NO: 9443 - protein, 6 aa, ARTIFICIAL SEQUENCE
  Synthetic Construct
EKAQEK

SEQ ID NO: 9444 - protein, 6 aa, ARTIFICIAL SEQUENCE
  Synthetic Construct
EKAQFK

SEQ ID NO: 9445 - protein, 6 aa, ARTIFICIAL SEQUENCE
  Synthetic Construct
EKAQGK

SEQ ID NO: 9446 - protein, 6 aa, ARTIFICIAL SEQUENCE
  Synthetic Construct
EKAQHK

SEQ ID NO: 9447 - protein, 6 aa, ARTIFICIAL SEQUENCE
  Synthetic Construct
EKAQIK

SEQ ID NO: 9448 - protein, 6 aa, ARTIFICIAL SEQUENCE
  Synthetic Construct
EKAQLK

SEQ ID NO: 9449 - protein, 6 aa, ARTIFICIAL SEQUENCE
  Synthetic Construct
EKAQNK

SEQ ID NO: 9450 - protein, 6 aa, ARTIFICIAL SEQUENCE
  Synthetic Construct
EKAQQK

SEQ ID NO: 9451 - protein, 6 aa, ARTIFICIAL SEQUENCE
  Synthetic Construct
EKAQRK

SEQ ID NO: 9452 - protein, 6 aa, ARTIFICIAL SEQUENCE
  Synthetic Construct
EKAQSK

SEQ ID NO: 9453 - protein, 6 aa, ARTIFICIAL SEQUENCE
  Synthetic Construct
EKAQTK

SEQ ID NO: 9454 - protein, 6 aa, ARTIFICIAL SEQUENCE
  Synthetic Construct
EKAQYK

SEQ ID NO: 9455 - protein, 6 aa, ARTIFICIAL SEQUENCE
  Synthetic Construct
EKARAK

SEQ ID NO: 9456 - protein, 6 aa, ARTIFICIAL SEQUENCE
  Synthetic Construct
EKARDK

SEQ ID NO: 9457 - protein, 6 aa, ARTIFICIAL SEQUENCE
  Synthetic Construct
EKAREK

SEQ ID NO: 9458 - protein, 6 aa, ARTIFICIAL SEQUENCE
  Synthetic Construct
EKARFK

SEQ ID NO: 9459 - protein, 6 aa, ARTIFICIAL SEQUENCE
  Synthetic Construct
EKARGK

SEQ ID NO: 9460 - protein, 6 aa, ARTIFICIAL SEQUENCE
  Synthetic Construct
EKARHK

SEQ ID NO: 9461 - protein, 6 aa, ARTIFICIAL SEQUENCE
  Synthetic Construct
EKARIK

SEQ ID NO: 9462 - protein, 6 aa, ARTIFICIAL SEQUENCE
  Synthetic Construct
EKARLK

SEQ ID NO: 9463 - protein, 6 aa, ARTIFICIAL SEQUENCE
  Synthetic Construct
EKARNK

SEQ ID NO: 9464 - protein, 6 aa, ARTIFICIAL SEQUENCE
  Synthetic Construct
EKARQK

SEQ ID NO: 9465 - protein, 6 aa, ARTIFICIAL SEQUENCE
  Synthetic Construct
EKARRK

SEQ ID NO: 9466 - protein, 6 aa, ARTIFICIAL SEQUENCE
  Synthetic Construct
EKARSK

SEQ ID NO: 9467 - protein, 6 aa, ARTIFICIAL SEQUENCE
  Synthetic Construct
EKARTK

SEQ ID NO: 9468 - protein, 6 aa, ARTIFICIAL SEQUENCE
  Synthetic Construct
EKARYK

SEQ ID NO: 9469 - protein, 6 aa, ARTIFICIAL SEQUENCE
  Synthetic Construct
EKASAK

SEQ ID NO: 9470 - protein, 6 aa, ARTIFICIAL SEQUENCE
  Synthetic Construct
EKASDK

SEQ ID NO: 9471 - protein, 6 aa, ARTIFICIAL SEQUENCE
  Synthetic Construct
EKASEK

SEQ ID NO: 9472 - protein, 6 aa, ARTIFICIAL SEQUENCE
  Synthetic Construct
EKASFK

SEQ ID NO: 9473 - protein, 6 aa, ARTIFICIAL SEQUENCE
  Synthetic Construct
EKASGK

SEQ ID NO: 9474 - protein, 6 aa, ARTIFICIAL SEQUENCE
  Synthetic Construct
EKASHK

SEQ ID NO: 9475 - protein, 6 aa, ARTIFICIAL SEQUENCE
  Synthetic Construct
EKASIK

SEQ ID NO: 9476 - protein, 6 aa, ARTIFICIAL SEQUENCE
  Synthetic Construct
EKASLK

SEQ ID NO: 9477 - protein, 6 aa, ARTIFICIAL SEQUENCE
  Synthetic Construct
EKASNK

SEQ ID NO: 9478 - protein, 6 aa, ARTIFICIAL SEQUENCE
  Synthetic Construct
EKASQK

SEQ ID NO: 9479 - protein, 6 aa, ARTIFICIAL SEQUENCE
  Synthetic Construct
EKASRK

SEQ ID NO: 9480 - protein, 6 aa, ARTIFICIAL SEQUENCE
  Synthetic Construct
EKASSK

SEQ ID NO: 9481 - protein, 6 aa, ARTIFICIAL SEQUENCE
  Synthetic Construct
EKASTK

SEQ ID NO: 9482 - protein, 6 aa, ARTIFICIAL SEQUENCE
  Synthetic Construct
EKASYK

SEQ ID NO: 9483 - protein, 6 aa, ARTIFICIAL SEQUENCE
  Synthetic Construct
EKATAK

SEQ ID NO: 9484 - protein, 6 aa, ARTIFICIAL SEQUENCE
  Synthetic Construct
EKATDK

SEQ ID NO: 9485 - protein, 6 aa, ARTIFICIAL SEQUENCE
  Synthetic Construct
EKATEK

SEQ ID NO: 9486 - protein, 6 aa, ARTIFICIAL SEQUENCE
  Synthetic Construct
EKATFK

SEQ ID NO: 9487 - protein, 6 aa, ARTIFICIAL SEQUENCE
  Synthetic Construct
EKATGK

SEQ ID NO: 9488 - protein, 6 aa, ARTIFICIAL SEQUENCE
  Synthetic Construct
EKATHK

SEQ ID NO: 9489 - protein, 6 aa, ARTIFICIAL SEQUENCE
  Synthetic Construct
EKATIK

SEQ ID NO: 9490 - protein, 6 aa, ARTIFICIAL SEQUENCE
  Synthetic Construct
EKATLK

SEQ ID NO: 9491 - protein, 6 aa, ARTIFICIAL SEQUENCE
  Synthetic Construct
EKATNK

SEQ ID NO: 9492 - protein, 6 aa, ARTIFICIAL SEQUENCE
  Synthetic Construct
EKATQK

SEQ ID NO: 9493 - protein, 6 aa, ARTIFICIAL SEQUENCE
  Synthetic Construct
EKATRK

SEQ ID NO: 9494 - protein, 6 aa, ARTIFICIAL SEQUENCE
  Synthetic Construct
EKATSK

SEQ ID NO: 9495 - protein, 6 aa, ARTIFICIAL SEQUENCE
  Synthetic Construct
EKATTK

SEQ ID NO: 9496 - protein, 6 aa, ARTIFICIAL SEQUENCE
  Synthetic Construct
EKATYK

SEQ ID NO: 9497 - protein, 6 aa, ARTIFICIAL SEQUENCE
  Synthetic Construct
EKAYAK

SEQ ID NO: 9498 - protein, 6 aa, ARTIFICIAL SEQUENCE
  Synthetic Construct
EKAYDK

SEQ ID NO: 9499 - protein, 6 aa, ARTIFICIAL SEQUENCE
  Synthetic Construct
EKAYEK

SEQ ID NO: 9500 - protein, 6 aa, ARTIFICIAL SEQUENCE
  Synthetic Construct
EKAYFK

SEQ ID NO: 9501 - protein, 6 aa, ARTIFICIAL SEQUENCE
  Synthetic Construct
EKAYGK

SEQ ID NO: 9502 - protein, 6 aa, ARTIFICIAL SEQUENCE
  Synthetic Construct
EKAYHK

SEQ ID NO: 9503 - protein, 6 aa, ARTIFICIAL SEQUENCE
  Synthetic Construct
EKAYIK

SEQ ID NO: 9504 - protein, 6 aa, ARTIFICIAL SEQUENCE
  Synthetic Construct
EKAYLK

SEQ ID NO: 9505 - protein, 6 aa, ARTIFICIAL SEQUENCE
  Synthetic Construct
EKAYNK

SEQ ID NO: 9506 - protein, 6 aa, ARTIFICIAL SEQUENCE
  Synthetic Construct
EKAYQK

SEQ ID NO: 9507 - protein, 6 aa, ARTIFICIAL SEQUENCE
  Synthetic Construct
EKAYRK

SEQ ID NO: 9508 - protein, 6 aa, ARTIFICIAL SEQUENCE
  Synthetic Construct
EKAYSK

SEQ ID NO: 9509 - protein, 6 aa, ARTIFICIAL SEQUENCE
  Synthetic Construct
EKAYTK

SEQ ID NO: 9510 - protein, 6 aa, ARTIFICIAL SEQUENCE
  Synthetic Construct
EKAYYK

SEQ ID NO: 9511 - protein, 6 aa, ARTIFICIAL SEQUENCE
  Synthetic Construct
EKDAAK

SEQ ID NO: 9512 - protein, 6 aa, ARTIFICIAL SEQUENCE
  Synthetic Construct
EKDADK

SEQ ID NO: 9513 - protein, 6 aa, ARTIFICIAL SEQUENCE
  Synthetic Construct
EKDAEK

SEQ ID NO: 9514 - protein, 6 aa, ARTIFICIAL SEQUENCE
  Synthetic Construct
EKDAFK

SEQ ID NO: 9515 - protein, 6 aa, ARTIFICIAL SEQUENCE
  Synthetic Construct
EKDAGK

SEQ ID NO: 9516 - protein, 6 aa, ARTIFICIAL SEQUENCE
  Synthetic Construct
EKDAHK

SEQ ID NO: 9517 - protein, 6 aa, ARTIFICIAL SEQUENCE
  Synthetic Construct
EKDAIK

SEQ ID NO: 9518 - protein, 6 aa, ARTIFICIAL SEQUENCE
  Synthetic Construct
EKDALK

SEQ ID NO: 9519 - protein, 6 aa, ARTIFICIAL SEQUENCE
  Synthetic Construct
EKDANK

SEQ ID NO: 9520 - protein, 6 aa, ARTIFICIAL SEQUENCE
  Synthetic Construct
EKDAQK

SEQ ID NO: 9521 - protein, 6 aa, ARTIFICIAL SEQUENCE
  Synthetic Construct
EKDARK

SEQ ID NO: 9522 - protein, 6 aa, ARTIFICIAL SEQUENCE
  Synthetic Construct
EKDASK

SEQ ID NO: 9523 - protein, 6 aa, ARTIFICIAL SEQUENCE
  Synthetic Construct
EKDATK

SEQ ID NO: 9524 - protein, 6 aa, ARTIFICIAL SEQUENCE
  Synthetic Construct
EKDAYK

SEQ ID NO: 9525 - protein, 6 aa, ARTIFICIAL SEQUENCE
  Synthetic Construct
EKDDAK

SEQ ID NO: 9526 - protein, 6 aa, ARTIFICIAL SEQUENCE
  Synthetic Construct
EKDDDK

SEQ ID NO: 9527 - protein, 6 aa, ARTIFICIAL SEQUENCE
  Synthetic Construct
EKDDEK

SEQ ID NO: 9528 - protein, 6 aa, ARTIFICIAL SEQUENCE
  Synthetic Construct
EKDDFK

SEQ ID NO: 9529 - protein, 6 aa, ARTIFICIAL SEQUENCE
  Synthetic Construct
EKDDGK

SEQ ID NO: 9530 - protein, 6 aa, ARTIFICIAL SEQUENCE
  Synthetic Construct
EKDDHK

SEQ ID NO: 9531 - protein, 6 aa, ARTIFICIAL SEQUENCE
  Synthetic Construct
EKDDIK

SEQ ID NO: 9532 - protein, 6 aa, ARTIFICIAL SEQUENCE
  Synthetic Construct
EKDDLK

SEQ ID NO: 9533 - protein, 6 aa, ARTIFICIAL SEQUENCE
  Synthetic Construct
EKDDNK

SEQ ID NO: 9534 - protein, 6 aa, ARTIFICIAL SEQUENCE
  Synthetic Construct
EKDDQK

SEQ ID NO: 9535 - protein, 6 aa, ARTIFICIAL SEQUENCE
  Synthetic Construct
EKDDRK

SEQ ID NO: 9536 - protein, 6 aa, ARTIFICIAL SEQUENCE
  Synthetic Construct
EKDDSK

SEQ ID NO: 9537 - protein, 6 aa, ARTIFICIAL SEQUENCE
  Synthetic Construct
EKDDTK

SEQ ID NO: 9538 - protein, 6 aa, ARTIFICIAL SEQUENCE
  Synthetic Construct
EKDDYK

SEQ ID NO: 9539 - protein, 6 aa, ARTIFICIAL SEQUENCE
  Synthetic Construct
EKDEAK

SEQ ID NO: 9540 - protein, 6 aa, ARTIFICIAL SEQUENCE
  Synthetic Construct
EKDEDK

SEQ ID NO: 9541 - protein, 6 aa, ARTIFICIAL SEQUENCE
  Synthetic Construct
EKDEEK

SEQ ID NO: 9542 - protein, 6 aa, ARTIFICIAL SEQUENCE
  Synthetic Construct
EKDEFK

SEQ ID NO: 9543 - protein, 6 aa, ARTIFICIAL SEQUENCE
  Synthetic Construct
EKDEGK

SEQ ID NO: 9544 - protein, 6 aa, ARTIFICIAL SEQUENCE
  Synthetic Construct
EKDEHK

SEQ ID NO: 9545 - protein, 6 aa, ARTIFICIAL SEQUENCE
  Synthetic Construct
EKDEIK

SEQ ID NO: 9546 - protein, 6 aa, ARTIFICIAL SEQUENCE
  Synthetic Construct
EKDELK

SEQ ID NO: 9547 - protein, 6 aa, ARTIFICIAL SEQUENCE
  Synthetic Construct
EKDENK

SEQ ID NO: 9548 - protein, 6 aa, ARTIFICIAL SEQUENCE
  Synthetic Construct
EKDEQK

SEQ ID NO: 9549 - protein, 6 aa, ARTIFICIAL SEQUENCE
  Synthetic Construct
EKDERK

SEQ ID NO: 9550 - protein, 6 aa, ARTIFICIAL SEQUENCE
  Synthetic Construct
EKDESK

SEQ ID NO: 9551 - protein, 6 aa, ARTIFICIAL SEQUENCE
  Synthetic Construct
EKDETK

SEQ ID NO: 9552 - protein, 6 aa, ARTIFICIAL SEQUENCE
  Synthetic Construct
EKDEYK

SEQ ID NO: 9553 - protein, 6 aa, ARTIFICIAL SEQUENCE
  Synthetic Construct
EKDFAK

SEQ ID NO: 9554 - protein, 6 aa, ARTIFICIAL SEQUENCE
  Synthetic Construct
EKDFDK

SEQ ID NO: 9555 - protein, 6 aa, ARTIFICIAL SEQUENCE
  Synthetic Construct
EKDFEK

SEQ ID NO: 9556 - protein, 6 aa, ARTIFICIAL SEQUENCE
  Synthetic Construct
EKDFFK

SEQ ID NO: 9557 - protein, 6 aa, ARTIFICIAL SEQUENCE
  Synthetic Construct
EKDFGK

SEQ ID NO: 9558 - protein, 6 aa, ARTIFICIAL SEQUENCE
  Synthetic Construct
EKDFHK

SEQ ID NO: 9559 - protein, 6 aa, ARTIFICIAL SEQUENCE
  Synthetic Construct
EKDFIK

SEQ ID NO: 9560 - protein, 6 aa, ARTIFICIAL SEQUENCE
  Synthetic Construct
EKDFLK

SEQ ID NO: 9561 - protein, 6 aa, ARTIFICIAL SEQUENCE
  Synthetic Construct
EKDFNK

SEQ ID NO: 9562 - protein, 6 aa, ARTIFICIAL SEQUENCE
  Synthetic Construct
EKDFQK

SEQ ID NO: 9563 - protein, 6 aa, ARTIFICIAL SEQUENCE
  Synthetic Construct
EKDFRK

SEQ ID NO: 9564 - protein, 6 aa, ARTIFICIAL SEQUENCE
  Synthetic Construct
EKDFSK

SEQ ID NO: 9565 - protein, 6 aa, ARTIFICIAL SEQUENCE
  Synthetic Construct
EKDFTK

SEQ ID NO: 9566 - protein, 6 aa, ARTIFICIAL SEQUENCE
  Synthetic Construct
EKDFYK

SEQ ID NO: 9567 - protein, 6 aa, ARTIFICIAL SEQUENCE
  Synthetic Construct
EKDGAK

SEQ ID NO: 9568 - protein, 6 aa, ARTIFICIAL SEQUENCE
  Synthetic Construct
EKDGDK

SEQ ID NO: 9569 - protein, 6 aa, ARTIFICIAL SEQUENCE
  Synthetic Construct
EKDGEK

SEQ ID NO: 9570 - protein, 6 aa, ARTIFICIAL SEQUENCE
  Synthetic Construct
EKDGFK

SEQ ID NO: 9571 - protein, 6 aa, ARTIFICIAL SEQUENCE
  Synthetic Construct
EKDGGK

SEQ ID NO: 9572 - protein, 6 aa, ARTIFICIAL SEQUENCE
  Synthetic Construct
EKDGHK

SEQ ID NO: 9573 - protein, 6 aa, ARTIFICIAL SEQUENCE
  Synthetic Construct
EKDGIK

SEQ ID NO: 9574 - protein, 6 aa, ARTIFICIAL SEQUENCE
  Synthetic Construct
EKDGLK

SEQ ID NO: 9575 - protein, 6 aa, ARTIFICIAL SEQUENCE
  Synthetic Construct
EKDGNK

SEQ ID NO: 9576 - protein, 6 aa, ARTIFICIAL SEQUENCE
  Synthetic Construct
EKDGQK

SEQ ID NO: 9577 - protein, 6 aa, ARTIFICIAL SEQUENCE
  Synthetic Construct
EKDGRK

SEQ ID NO: 9578 - protein, 6 aa, ARTIFICIAL SEQUENCE
  Synthetic Construct
EKDGSK

SEQ ID NO: 9579 - protein, 6 aa, ARTIFICIAL SEQUENCE
  Synthetic Construct
EKDGTK

SEQ ID NO: 9580 - protein, 6 aa, ARTIFICIAL SEQUENCE
  Synthetic Construct
EKDGYK

SEQ ID NO: 9581 - protein, 6 aa, ARTIFICIAL SEQUENCE
  Synthetic Construct
EKDHAK

SEQ ID NO: 9582 - protein, 6 aa, ARTIFICIAL SEQUENCE
  Synthetic Construct
EKDHDK

SEQ ID NO: 9583 - protein, 6 aa, ARTIFICIAL SEQUENCE
  Synthetic Construct
EKDHEK

SEQ ID NO: 9584 - protein, 6 aa, ARTIFICIAL SEQUENCE
  Synthetic Construct
EKDHFK

SEQ ID NO: 9585 - protein, 6 aa, ARTIFICIAL SEQUENCE
  Synthetic Construct
EKDHGK

SEQ ID NO: 9586 - protein, 6 aa, ARTIFICIAL SEQUENCE
  Synthetic Construct
EKDHHK

SEQ ID NO: 9587 - protein, 6 aa, ARTIFICIAL SEQUENCE
  Synthetic Construct
EKDHIK

SEQ ID NO: 9588 - protein, 6 aa, ARTIFICIAL SEQUENCE
  Synthetic Construct
EKDHLK

SEQ ID NO: 9589 - protein, 6 aa, ARTIFICIAL SEQUENCE
  Synthetic Construct
EKDHNK

SEQ ID NO: 9590 - protein, 6 aa, ARTIFICIAL SEQUENCE
  Synthetic Construct
EKDHQK

SEQ ID NO: 9591 - protein, 6 aa, ARTIFICIAL SEQUENCE
  Synthetic Construct
EKDHRK

SEQ ID NO: 9592 - protein, 6 aa, ARTIFICIAL SEQUENCE
  Synthetic Construct
EKDHSK

SEQ ID NO: 9593 - protein, 6 aa, ARTIFICIAL SEQUENCE
  Synthetic Construct
EKDHTK

SEQ ID NO: 9594 - protein, 6 aa, ARTIFICIAL SEQUENCE
  Synthetic Construct
EKDHYK

SEQ ID NO: 9595 - protein, 6 aa, ARTIFICIAL SEQUENCE
  Synthetic Construct
EKDIAK

SEQ ID NO: 9596 - protein, 6 aa, ARTIFICIAL SEQUENCE
  Synthetic Construct
EKDIDK

SEQ ID NO: 9597 - protein, 6 aa, ARTIFICIAL SEQUENCE
  Synthetic Construct
EKDIEK

SEQ ID NO: 9598 - protein, 6 aa, ARTIFICIAL SEQUENCE
  Synthetic Construct
EKDIFK

SEQ ID NO: 9599 - protein, 6 aa, ARTIFICIAL SEQUENCE
  Synthetic Construct
EKDIGK

SEQ ID NO: 9600 - protein, 6 aa, ARTIFICIAL SEQUENCE
  Synthetic Construct
EKDIHK

SEQ ID NO: 9601 - protein, 6 aa, ARTIFICIAL SEQUENCE
  Synthetic Construct
EKDIIK

SEQ ID NO: 9602 - protein, 6 aa, ARTIFICIAL SEQUENCE
  Synthetic Construct
EKDILK

SEQ ID NO: 9603 - protein, 6 aa, ARTIFICIAL SEQUENCE
  Synthetic Construct
EKDINK

SEQ ID NO: 9604 - protein, 6 aa, ARTIFICIAL SEQUENCE
  Synthetic Construct
EKDIQK

SEQ ID NO: 9605 - protein, 6 aa, ARTIFICIAL SEQUENCE
  Synthetic Construct
EKDIRK

SEQ ID NO: 9606 - protein, 6 aa, ARTIFICIAL SEQUENCE
  Synthetic Construct
EKDISK

SEQ ID NO: 9607 - protein, 6 aa, ARTIFICIAL SEQUENCE
  Synthetic Construct
EKDITK

SEQ ID NO: 9608 - protein, 6 aa, ARTIFICIAL SEQUENCE
  Synthetic Construct
EKDIYK

SEQ ID NO: 9609 - protein, 6 aa, ARTIFICIAL SEQUENCE
  Synthetic Construct
EKDLAK

SEQ ID NO: 9610 - protein, 6 aa, ARTIFICIAL SEQUENCE
  Synthetic Construct
EKDLDK

SEQ ID NO: 9611 - protein, 6 aa, ARTIFICIAL SEQUENCE
  Synthetic Construct
EKDLEK

SEQ ID NO: 9612 - protein, 6 aa, ARTIFICIAL SEQUENCE
  Synthetic Construct
EKDLFK

SEQ ID NO: 9613 - protein, 6 aa, ARTIFICIAL SEQUENCE
  Synthetic Construct
EKDLGK

SEQ ID NO: 9614 - protein, 6 aa, ARTIFICIAL SEQUENCE
  Synthetic Construct
EKDLHK

SEQ ID NO: 9615 - protein, 6 aa, ARTIFICIAL SEQUENCE
  Synthetic Construct
EKDLIK

SEQ ID NO: 9616 - protein, 6 aa, ARTIFICIAL SEQUENCE
  Synthetic Construct
EKDLLK

SEQ ID NO: 9617 - protein, 6 aa, ARTIFICIAL SEQUENCE
  Synthetic Construct
EKDLNK

SEQ ID NO: 9618 - protein, 6 aa, ARTIFICIAL SEQUENCE
  Synthetic Construct
EKDLQK

SEQ ID NO: 9619 - protein, 6 aa, ARTIFICIAL SEQUENCE
  Synthetic Construct
EKDLRK

SEQ ID NO: 9620 - protein, 6 aa, ARTIFICIAL SEQUENCE
  Synthetic Construct
EKDLSK

SEQ ID NO: 9621 - protein, 6 aa, ARTIFICIAL SEQUENCE
  Synthetic Construct
EKDLTK

SEQ ID NO: 9622 - protein, 6 aa, ARTIFICIAL SEQUENCE
  Synthetic Construct
EKDLYK

SEQ ID NO: 9623 - protein, 6 aa, ARTIFICIAL SEQUENCE
  Synthetic Construct
EKDNAK

SEQ ID NO: 9624 - protein, 6 aa, ARTIFICIAL SEQUENCE
  Synthetic Construct
EKDNDK

SEQ ID NO: 9625 - protein, 6 aa, ARTIFICIAL SEQUENCE
  Synthetic Construct
EKDNEK

SEQ ID NO: 9626 - protein, 6 aa, ARTIFICIAL SEQUENCE
  Synthetic Construct
EKDNFK

SEQ ID NO: 9627 - protein, 6 aa, ARTIFICIAL SEQUENCE
  Synthetic Construct
EKDNGK

SEQ ID NO: 9628 - protein, 6 aa, ARTIFICIAL SEQUENCE
  Synthetic Construct
EKDNHK

SEQ ID NO: 9629 - protein, 6 aa, ARTIFICIAL SEQUENCE
  Synthetic Construct
EKDNIK

SEQ ID NO: 9630 - protein, 6 aa, ARTIFICIAL SEQUENCE
  Synthetic Construct
EKDNLK

SEQ ID NO: 9631 - protein, 6 aa, ARTIFICIAL SEQUENCE
  Synthetic Construct
EKDNNK

SEQ ID NO: 9632 - protein, 6 aa, ARTIFICIAL SEQUENCE
  Synthetic Construct
EKDNQK

SEQ ID NO: 9633 - protein, 6 aa, ARTIFICIAL SEQUENCE
  Synthetic Construct
EKDNRK

SEQ ID NO: 9634 - protein, 6 aa, ARTIFICIAL SEQUENCE
  Synthetic Construct
EKDNSK

SEQ ID NO: 9635 - protein, 6 aa, ARTIFICIAL SEQUENCE
  Synthetic Construct
EKDNTK

SEQ ID NO: 9636 - protein, 6 aa, ARTIFICIAL SEQUENCE
  Synthetic Construct
EKDNYK

SEQ ID NO: 9637 - protein, 6 aa, ARTIFICIAL SEQUENCE
  Synthetic Construct
EKDQAK

SEQ ID NO: 9638 - protein, 6 aa, ARTIFICIAL SEQUENCE
  Synthetic Construct
EKDQDK

SEQ ID NO: 9639 - protein, 6 aa, ARTIFICIAL SEQUENCE
  Synthetic Construct
EKDQEK

SEQ ID NO: 9640 - protein, 6 aa, ARTIFICIAL SEQUENCE
  Synthetic Construct
EKDQFK

SEQ ID NO: 9641 - protein, 6 aa, ARTIFICIAL SEQUENCE
  Synthetic Construct
EKDQGK

SEQ ID NO: 9642 - protein, 6 aa, ARTIFICIAL SEQUENCE
  Synthetic Construct
EKDQHK

SEQ ID NO: 9643 - protein, 6 aa, ARTIFICIAL SEQUENCE
  Synthetic Construct
EKDQIK

SEQ ID NO: 9644 - protein, 6 aa, ARTIFICIAL SEQUENCE
  Synthetic Construct
EKDQLK

SEQ ID NO: 9645 - protein, 6 aa, ARTIFICIAL SEQUENCE
  Synthetic Construct
EKDQNK

SEQ ID NO: 9646 - protein, 6 aa, ARTIFICIAL SEQUENCE
  Synthetic Construct
EKDQQK

SEQ ID NO: 9647 - protein, 6 aa, ARTIFICIAL SEQUENCE
  Synthetic Construct
EKDQRK

SEQ ID NO: 9648 - protein, 6 aa, ARTIFICIAL SEQUENCE
  Synthetic Construct
EKDQSK

SEQ ID NO: 9649 - protein, 6 aa, ARTIFICIAL SEQUENCE
  Synthetic Construct
EKDQTK

SEQ ID NO: 9650 - protein, 6 aa, ARTIFICIAL SEQUENCE
  Synthetic Construct
EKDQYK

SEQ ID NO: 9651 - protein, 6 aa, ARTIFICIAL SEQUENCE
  Synthetic Construct
EKDRAK

SEQ ID NO: 9652 - protein, 6 aa, ARTIFICIAL SEQUENCE
  Synthetic Construct
EKDRDK

SEQ ID NO: 9653 - protein, 6 aa, ARTIFICIAL SEQUENCE
  Synthetic Construct
EKDREK

SEQ ID NO: 9654 - protein, 6 aa, ARTIFICIAL SEQUENCE
  Synthetic Construct
EKDRFK

SEQ ID NO: 9655 - protein, 6 aa, ARTIFICIAL SEQUENCE
  Synthetic Construct
EKDRGK

SEQ ID NO: 9656 - protein, 6 aa, ARTIFICIAL SEQUENCE
  Synthetic Construct
EKDRHK

SEQ ID NO: 9657 - protein, 6 aa, ARTIFICIAL SEQUENCE
  Synthetic Construct
EKDRIK

SEQ ID NO: 9658 - protein, 6 aa, ARTIFICIAL SEQUENCE
  Synthetic Construct
EKDRLK

SEQ ID NO: 9659 - protein, 6 aa, ARTIFICIAL SEQUENCE
  Synthetic Construct
EKDRNK

SEQ ID NO: 9660 - protein, 6 aa, ARTIFICIAL SEQUENCE
  Synthetic Construct
EKDRQK

SEQ ID NO: 9661 - protein, 6 aa, ARTIFICIAL SEQUENCE
  Synthetic Construct
EKDRRK

SEQ ID NO: 9662 - protein, 6 aa, ARTIFICIAL SEQUENCE
  Synthetic Construct
EKDRSK

SEQ ID NO: 9663 - protein, 6 aa, ARTIFICIAL SEQUENCE
  Synthetic Construct
EKDRTK

SEQ ID NO: 9664 - protein, 6 aa, ARTIFICIAL SEQUENCE
  Synthetic Construct
EKDRYK

SEQ ID NO: 9665 - protein, 6 aa, ARTIFICIAL SEQUENCE
  Synthetic Construct
EKDSAK

SEQ ID NO: 9666 - protein, 6 aa, ARTIFICIAL SEQUENCE
  Synthetic Construct
EKDSDK

SEQ ID NO: 9667 - protein, 6 aa, ARTIFICIAL SEQUENCE
  Synthetic Construct
EKDSEK

SEQ ID NO: 9668 - protein, 6 aa, ARTIFICIAL SEQUENCE
  Synthetic Construct
EKDSFK

SEQ ID NO: 9669 - protein, 6 aa, ARTIFICIAL SEQUENCE
  Synthetic Construct
EKDSGK

SEQ ID NO: 9670 - protein, 6 aa, ARTIFICIAL SEQUENCE
  Synthetic Construct
EKDSHK

SEQ ID NO: 9671 - protein, 6 aa, ARTIFICIAL SEQUENCE
  Synthetic Construct
EKDSIK

SEQ ID NO: 9672 - protein, 6 aa, ARTIFICIAL SEQUENCE
  Synthetic Construct
EKDSLK

SEQ ID NO: 9673 - protein, 6 aa, ARTIFICIAL SEQUENCE
  Synthetic Construct
EKDSNK

SEQ ID NO: 9674 - protein, 6 aa, ARTIFICIAL SEQUENCE
  Synthetic Construct
EKDSQK

SEQ ID NO: 9675 - protein, 6 aa, ARTIFICIAL SEQUENCE
  Synthetic Construct
EKDSRK

SEQ ID NO: 9676 - protein, 6 aa, ARTIFICIAL SEQUENCE
  Synthetic Construct
EKDSSK

SEQ ID NO: 9677 - protein, 6 aa, ARTIFICIAL SEQUENCE
  Synthetic Construct
EKDSTK

SEQ ID NO: 9678 - protein, 6 aa, ARTIFICIAL SEQUENCE
  Synthetic Construct
EKDSYK

SEQ ID NO: 9679 - protein, 6 aa, ARTIFICIAL SEQUENCE
  Synthetic Construct
EKDTAK

SEQ ID NO: 9680 - protein, 6 aa, ARTIFICIAL SEQUENCE
  Synthetic Construct
EKDTDK

SEQ ID NO: 9681 - protein, 6 aa, ARTIFICIAL SEQUENCE
  Synthetic Construct
EKDTEK

SEQ ID NO: 9682 - protein, 6 aa, ARTIFICIAL SEQUENCE
  Synthetic Construct
EKDTFK

SEQ ID NO: 9683 - protein, 6 aa, ARTIFICIAL SEQUENCE
  Synthetic Construct
EKDTGK

SEQ ID NO: 9684 - protein, 6 aa, ARTIFICIAL SEQUENCE
  Synthetic Construct
EKDTHK

SEQ ID NO: 9685 - protein, 6 aa, ARTIFICIAL SEQUENCE
  Synthetic Construct
EKDTIK

SEQ ID NO: 9686 - protein, 6 aa, ARTIFICIAL SEQUENCE
  Synthetic Construct
EKDTLK

SEQ ID NO: 9687 - protein, 6 aa, ARTIFICIAL SEQUENCE
  Synthetic Construct
EKDTNK

SEQ ID NO: 9688 - protein, 6 aa, ARTIFICIAL SEQUENCE
  Synthetic Construct
EKDTQK

SEQ ID NO: 9689 - protein, 6 aa, ARTIFICIAL SEQUENCE
  Synthetic Construct
EKDTRK

SEQ ID NO: 9690 - protein, 6 aa, ARTIFICIAL SEQUENCE
  Synthetic Construct
EKDTSK

SEQ ID NO: 9691 - protein, 6 aa, ARTIFICIAL SEQUENCE
  Synthetic Construct
EKDTTK

SEQ ID NO: 9692 - protein, 6 aa, ARTIFICIAL SEQUENCE
  Synthetic Construct
EKDTYK

SEQ ID NO: 9693 - protein, 6 aa, ARTIFICIAL SEQUENCE
  Synthetic Construct
EKDYAK

SEQ ID NO: 9694 - protein, 6 aa, ARTIFICIAL SEQUENCE
  Synthetic Construct
EKDYDK

SEQ ID NO: 9695 - protein, 6 aa, ARTIFICIAL SEQUENCE
  Synthetic Construct
EKDYEK

SEQ ID NO: 9696 - protein, 6 aa, ARTIFICIAL SEQUENCE
  Synthetic Construct
EKDYFK

SEQ ID NO: 9697 - protein, 6 aa, ARTIFICIAL SEQUENCE
  Synthetic Construct
EKDYGK

SEQ ID NO: 9698 - protein, 6 aa, ARTIFICIAL SEQUENCE
  Synthetic Construct
EKDYHK

SEQ ID NO: 9699 - protein, 6 aa, ARTIFICIAL SEQUENCE
  Synthetic Construct
EKDYIK

SEQ ID NO: 9700 - protein, 6 aa, ARTIFICIAL SEQUENCE
  Synthetic Construct
EKDYLK

SEQ ID NO: 9701 - protein, 6 aa, ARTIFICIAL SEQUENCE
  Synthetic Construct
EKDYNK

SEQ ID NO: 9702 - protein, 6 aa, ARTIFICIAL SEQUENCE
  Synthetic Construct
EKDYQK

SEQ ID NO: 9703 - protein, 6 aa, ARTIFICIAL SEQUENCE
  Synthetic Construct
EKDYRK

SEQ ID NO: 9704 - protein, 6 aa, ARTIFICIAL SEQUENCE
  Synthetic Construct
EKDYSK

SEQ ID NO: 9705 - protein, 6 aa, ARTIFICIAL SEQUENCE
  Synthetic Construct
EKDYTK

SEQ ID NO: 9706 - protein, 6 aa, ARTIFICIAL SEQUENCE
  Synthetic Construct
EKDYYK

SEQ ID NO: 9707 - protein, 6 aa, ARTIFICIAL SEQUENCE
  Synthetic Construct
EKEAAK

SEQ ID NO: 9708 - protein, 6 aa, ARTIFICIAL SEQUENCE
  Synthetic Construct
EKEADK

SEQ ID NO: 9709 - protein, 6 aa, ARTIFICIAL SEQUENCE
  Synthetic Construct
EKEAEK

SEQ ID NO: 9710 - protein, 6 aa, ARTIFICIAL SEQUENCE
  Synthetic Construct
EKEAFK

SEQ ID NO: 9711 - protein, 6 aa, ARTIFICIAL SEQUENCE
  Synthetic Construct
EKEAGK

SEQ ID NO: 9712 - protein, 6 aa, ARTIFICIAL SEQUENCE
  Synthetic Construct
EKEAHK

SEQ ID NO: 9713 - protein, 6 aa, ARTIFICIAL SEQUENCE
  Synthetic Construct
EKEAIK

SEQ ID NO: 9714 - protein, 6 aa, ARTIFICIAL SEQUENCE
  Synthetic Construct
EKEALK

SEQ ID NO: 9715 - protein, 6 aa, ARTIFICIAL SEQUENCE
  Synthetic Construct
EKEANK

SEQ ID NO: 9716 - protein, 6 aa, ARTIFICIAL SEQUENCE
  Synthetic Construct
EKEAQK

SEQ ID NO: 9717 - protein, 6 aa, ARTIFICIAL SEQUENCE
  Synthetic Construct
EKEARK

SEQ ID NO: 9718 - protein, 6 aa, ARTIFICIAL SEQUENCE
  Synthetic Construct
EKEASK

SEQ ID NO: 9719 - protein, 6 aa, ARTIFICIAL SEQUENCE
  Synthetic Construct
EKEATK

SEQ ID NO: 9720 - protein, 6 aa, ARTIFICIAL SEQUENCE
  Synthetic Construct
EKEAYK

SEQ ID NO: 9721 - protein, 6 aa, ARTIFICIAL SEQUENCE
  Synthetic Construct
EKEDAK

SEQ ID NO: 9722 - protein, 6 aa, ARTIFICIAL SEQUENCE
  Synthetic Construct
EKEDDK

SEQ ID NO: 9723 - protein, 6 aa, ARTIFICIAL SEQUENCE
  Synthetic Construct
EKEDEK

SEQ ID NO: 9724 - protein, 6 aa, ARTIFICIAL SEQUENCE
  Synthetic Construct
EKEDFK

SEQ ID NO: 9725 - protein, 6 aa, ARTIFICIAL SEQUENCE
  Synthetic Construct
EKEDGK

SEQ ID NO: 9726 - protein, 6 aa, ARTIFICIAL SEQUENCE
  Synthetic Construct
EKEDHK

SEQ ID NO: 9727 - protein, 6 aa, ARTIFICIAL SEQUENCE
  Synthetic Construct
EKEDIK

SEQ ID NO: 9728 - protein, 6 aa, ARTIFICIAL SEQUENCE
  Synthetic Construct
EKEDLK

SEQ ID NO: 9729 - protein, 6 aa, ARTIFICIAL SEQUENCE
  Synthetic Construct
EKEDNK

SEQ ID NO: 9730 - protein, 6 aa, ARTIFICIAL SEQUENCE
  Synthetic Construct
EKEDQK

SEQ ID NO: 9731 - protein, 6 aa, ARTIFICIAL SEQUENCE
  Synthetic Construct
EKEDRK

SEQ ID NO: 9732 - protein, 6 aa, ARTIFICIAL SEQUENCE
  Synthetic Construct
EKEDSK

SEQ ID NO: 9733 - protein, 6 aa, ARTIFICIAL SEQUENCE
  Synthetic Construct
EKEDTK

SEQ ID NO: 9734 - protein, 6 aa, ARTIFICIAL SEQUENCE
  Synthetic Construct
EKEDYK

SEQ ID NO: 9735 - protein, 6 aa, ARTIFICIAL SEQUENCE
  Synthetic Construct
EKEEAK

SEQ ID NO: 9736 - protein, 6 aa, ARTIFICIAL SEQUENCE
  Synthetic Construct
EKEEDK

SEQ ID NO: 9737 - protein, 6 aa, ARTIFICIAL SEQUENCE
  Synthetic Construct
EKEEEK

SEQ ID NO: 9738 - protein, 6 aa, ARTIFICIAL SEQUENCE
  Synthetic Construct
EKEEFK

SEQ ID NO: 9739 - protein, 6 aa, ARTIFICIAL SEQUENCE
  Synthetic Construct
EKEEGK

SEQ ID NO: 9740 - protein, 6 aa, ARTIFICIAL SEQUENCE
  Synthetic Construct
EKEEHK

SEQ ID NO: 9741 - protein, 6 aa, ARTIFICIAL SEQUENCE
  Synthetic Construct
EKEEIK

SEQ ID NO: 9742 - protein, 6 aa, ARTIFICIAL SEQUENCE
  Synthetic Construct
EKEELK

SEQ ID NO: 9743 - protein, 6 aa, ARTIFICIAL SEQUENCE
  Synthetic Construct
EKEENK

SEQ ID NO: 9744 - protein, 6 aa, ARTIFICIAL SEQUENCE
  Synthetic Construct
EKEEQK

SEQ ID NO: 9745 - protein, 6 aa, ARTIFICIAL SEQUENCE
  Synthetic Construct
EKEERK

SEQ ID NO: 9746 - protein, 6 aa, ARTIFICIAL SEQUENCE
  Synthetic Construct
EKEESK

SEQ ID NO: 9747 - protein, 6 aa, ARTIFICIAL SEQUENCE
  Synthetic Construct
EKEETK

SEQ ID NO: 9748 - protein, 6 aa, ARTIFICIAL SEQUENCE
  Synthetic Construct
EKEEYK

SEQ ID NO: 9749 - protein, 6 aa, ARTIFICIAL SEQUENCE
  Synthetic Construct
EKEFAK

SEQ ID NO: 9750 - protein, 6 aa, ARTIFICIAL SEQUENCE
  Synthetic Construct
EKEFDK

SEQ ID NO: 9751 - protein, 6 aa, ARTIFICIAL SEQUENCE
  Synthetic Construct
EKEFEK

SEQ ID NO: 9752 - protein, 6 aa, ARTIFICIAL SEQUENCE
  Synthetic Construct
EKEFFK

SEQ ID NO: 9753 - protein, 6 aa, ARTIFICIAL SEQUENCE
  Synthetic Construct
EKEFGK

SEQ ID NO: 9754 - protein, 6 aa, ARTIFICIAL SEQUENCE
  Synthetic Construct
EKEFHK

SEQ ID NO: 9755 - protein, 6 aa, ARTIFICIAL SEQUENCE
  Synthetic Construct
EKEFIK

SEQ ID NO: 9756 - protein, 6 aa, ARTIFICIAL SEQUENCE
  Synthetic Construct
EKEFLK

SEQ ID NO: 9757 - protein, 6 aa, ARTIFICIAL SEQUENCE
  Synthetic Construct
EKEFNK

SEQ ID NO: 9758 - protein, 6 aa, ARTIFICIAL SEQUENCE
  Synthetic Construct
EKEFQK

SEQ ID NO: 9759 - protein, 6 aa, ARTIFICIAL SEQUENCE
  Synthetic Construct
EKEFRK

SEQ ID NO: 9760 - protein, 6 aa, ARTIFICIAL SEQUENCE
  Synthetic Construct
EKEFSK

SEQ ID NO: 9761 - protein, 6 aa, ARTIFICIAL SEQUENCE
  Synthetic Construct
EKEFTK

SEQ ID NO: 9762 - protein, 6 aa, ARTIFICIAL SEQUENCE
  Synthetic Construct
EKEFYK

SEQ ID NO: 9763 - protein, 6 aa, ARTIFICIAL SEQUENCE
  Synthetic Construct
EKEGAK

SEQ ID NO: 9764 - protein, 6 aa, ARTIFICIAL SEQUENCE
  Synthetic Construct
EKEGDK

SEQ ID NO: 9765 - protein, 6 aa, ARTIFICIAL SEQUENCE
  Synthetic Construct
EKEGEK

SEQ ID NO: 9766 - protein, 6 aa, ARTIFICIAL SEQUENCE
  Synthetic Construct
EKEGFK

SEQ ID NO: 9767 - protein, 6 aa, ARTIFICIAL SEQUENCE
  Synthetic Construct
EKEGGK

SEQ ID NO: 9768 - protein, 6 aa, ARTIFICIAL SEQUENCE
  Synthetic Construct
EKEGHK

SEQ ID NO: 9769 - protein, 6 aa, ARTIFICIAL SEQUENCE
  Synthetic Construct
EKEGIK

SEQ ID NO: 9770 - protein, 6 aa, ARTIFICIAL SEQUENCE
  Synthetic Construct
EKEGLK

SEQ ID NO: 9771 - protein, 6 aa, ARTIFICIAL SEQUENCE
  Synthetic Construct
EKEGNK

SEQ ID NO: 9772 - protein, 6 aa, ARTIFICIAL SEQUENCE
  Synthetic Construct
EKEGQK

SEQ ID NO: 9773 - protein, 6 aa, ARTIFICIAL SEQUENCE
  Synthetic Construct
EKEGRK

SEQ ID NO: 9774 - protein, 6 aa, ARTIFICIAL SEQUENCE
  Synthetic Construct
EKEGSK

SEQ ID NO: 9775 - protein, 6 aa, ARTIFICIAL SEQUENCE
  Synthetic Construct
EKEGTK

SEQ ID NO: 9776 - protein, 6 aa, ARTIFICIAL SEQUENCE
  Synthetic Construct
EKEGYK

SEQ ID NO: 9777 - protein, 6 aa, ARTIFICIAL SEQUENCE
  Synthetic Construct
EKEHAK

SEQ ID NO: 9778 - protein, 6 aa, ARTIFICIAL SEQUENCE
  Synthetic Construct
EKEHDK

SEQ ID NO: 9779 - protein, 6 aa, ARTIFICIAL SEQUENCE
  Synthetic Construct
EKEHEK

SEQ ID NO: 9780 - protein, 6 aa, ARTIFICIAL SEQUENCE
  Synthetic Construct
EKEHFK

SEQ ID NO: 9781 - protein, 6 aa, ARTIFICIAL SEQUENCE
  Synthetic Construct
EKEHGK

SEQ ID NO: 9782 - protein, 6 aa, ARTIFICIAL SEQUENCE
  Synthetic Construct
EKEHHK

SEQ ID NO: 9783 - protein, 6 aa, ARTIFICIAL SEQUENCE
  Synthetic Construct
EKEHIK

SEQ ID NO: 9784 - protein, 6 aa, ARTIFICIAL SEQUENCE
  Synthetic Construct
EKEHLK

SEQ ID NO: 9785 - protein, 6 aa, ARTIFICIAL SEQUENCE
  Synthetic Construct
EKEHNK

SEQ ID NO: 9786 - protein, 6 aa, ARTIFICIAL SEQUENCE
  Synthetic Construct
EKEHQK

SEQ ID NO: 9787 - protein, 6 aa, ARTIFICIAL SEQUENCE
  Synthetic Construct
EKEHRK

SEQ ID NO: 9788 - protein, 6 aa, ARTIFICIAL SEQUENCE
  Synthetic Construct
EKEHSK

SEQ ID NO: 9789 - protein, 6 aa, ARTIFICIAL SEQUENCE
  Synthetic Construct
EKEHTK

SEQ ID NO: 9790 - protein, 6 aa, ARTIFICIAL SEQUENCE
  Synthetic Construct
EKEHYK

SEQ ID NO: 9791 - protein, 6 aa, ARTIFICIAL SEQUENCE
  Synthetic Construct
EKEIAK

SEQ ID NO: 9792 - protein, 6 aa, ARTIFICIAL SEQUENCE
  Synthetic Construct
EKEIDK

SEQ ID NO: 9793 - protein, 6 aa, ARTIFICIAL SEQUENCE
  Synthetic Construct
EKEIEK

SEQ ID NO: 9794 - protein, 6 aa, ARTIFICIAL SEQUENCE
  Synthetic Construct
EKEIFK

SEQ ID NO: 9795 - protein, 6 aa, ARTIFICIAL SEQUENCE
  Synthetic Construct
EKEIGK

SEQ ID NO: 9796 - protein, 6 aa, ARTIFICIAL SEQUENCE
  Synthetic Construct
EKEIHK

SEQ ID NO: 9797 - protein, 6 aa, ARTIFICIAL SEQUENCE
  Synthetic Construct
EKEIIK

SEQ ID NO: 9798 - protein, 6 aa, ARTIFICIAL SEQUENCE
  Synthetic Construct
EKEILK

SEQ ID NO: 9799 - protein, 6 aa, ARTIFICIAL SEQUENCE
  Synthetic Construct
EKEINK

SEQ ID NO: 9800 - protein, 6 aa, ARTIFICIAL SEQUENCE
  Synthetic Construct
EKEIQK

SEQ ID NO: 9801 - protein, 6 aa, ARTIFICIAL SEQUENCE
  Synthetic Construct
EKEIRK

SEQ ID NO: 9802 - protein, 6 aa, ARTIFICIAL SEQUENCE
  Synthetic Construct
EKEISK

SEQ ID NO: 9803 - protein, 6 aa, ARTIFICIAL SEQUENCE
  Synthetic Construct
EKEITK

SEQ ID NO: 9804 - protein, 6 aa, ARTIFICIAL SEQUENCE
  Synthetic Construct
EKEIYK

SEQ ID NO: 9805 - protein, 6 aa, ARTIFICIAL SEQUENCE
  Synthetic Construct
EKELAK

SEQ ID NO: 9806 - protein, 6 aa, ARTIFICIAL SEQUENCE
  Synthetic Construct
EKELDK

SEQ ID NO: 9807 - protein, 6 aa, ARTIFICIAL SEQUENCE
  Synthetic Construct
EKELEK

SEQ ID NO: 9808 - protein, 6 aa, ARTIFICIAL SEQUENCE
  Synthetic Construct
EKELFK

SEQ ID NO: 9809 - protein, 6 aa, ARTIFICIAL SEQUENCE
  Synthetic Construct
EKELGK

SEQ ID NO: 9810 - protein, 6 aa, ARTIFICIAL SEQUENCE
  Synthetic Construct
EKELHK

SEQ ID NO: 9811 - protein, 6 aa, ARTIFICIAL SEQUENCE
  Synthetic Construct
EKELIK

SEQ ID NO: 9812 - protein, 6 aa, ARTIFICIAL SEQUENCE
  Synthetic Construct
EKELLK

SEQ ID NO: 9813 - protein, 6 aa, ARTIFICIAL SEQUENCE
  Synthetic Construct
EKELNK

SEQ ID NO: 9814 - protein, 6 aa, ARTIFICIAL SEQUENCE
  Synthetic Construct
EKELQK

SEQ ID NO: 9815 - protein, 6 aa, ARTIFICIAL SEQUENCE
  Synthetic Construct
EKELRK

SEQ ID NO: 9816 - protein, 6 aa, ARTIFICIAL SEQUENCE
  Synthetic Construct
EKELSK

SEQ ID NO: 9817 - protein, 6 aa, ARTIFICIAL SEQUENCE
  Synthetic Construct
EKELTK

SEQ ID NO: 9818 - protein, 6 aa, ARTIFICIAL SEQUENCE
  Synthetic Construct
EKELYK

SEQ ID NO: 9819 - protein, 6 aa, ARTIFICIAL SEQUENCE
  Synthetic Construct
EKENAK

SEQ ID NO: 9820 - protein, 6 aa, ARTIFICIAL SEQUENCE
  Synthetic Construct
EKENDK

SEQ ID NO: 9821 - protein, 6 aa, ARTIFICIAL SEQUENCE
  Synthetic Construct
EKENEK

SEQ ID NO: 9822 - protein, 6 aa, ARTIFICIAL SEQUENCE
  Synthetic Construct
EKENFK

SEQ ID NO: 9823 - protein, 6 aa, ARTIFICIAL SEQUENCE
  Synthetic Construct
EKENGK

SEQ ID NO: 9824 - protein, 6 aa, ARTIFICIAL SEQUENCE
  Synthetic Construct
EKENHK

SEQ ID NO: 9825 - protein, 6 aa, ARTIFICIAL SEQUENCE
  Synthetic Construct
EKENIK

SEQ ID NO: 9826 - protein, 6 aa, ARTIFICIAL SEQUENCE
  Synthetic Construct
EKENLK

SEQ ID NO: 9827 - protein, 6 aa, ARTIFICIAL SEQUENCE
  Synthetic Construct
EKENNK

SEQ ID NO: 9828 - protein, 6 aa, ARTIFICIAL SEQUENCE
  Synthetic Construct
EKENQK

SEQ ID NO: 9829 - protein, 6 aa, ARTIFICIAL SEQUENCE
  Synthetic Construct
EKENRK

SEQ ID NO: 9830 - protein, 6 aa, ARTIFICIAL SEQUENCE
  Synthetic Construct
EKENSK

SEQ ID NO: 9831 - protein, 6 aa, ARTIFICIAL SEQUENCE
  Synthetic Construct
EKENTK

SEQ ID NO: 9832 - protein, 6 aa, ARTIFICIAL SEQUENCE
  Synthetic Construct
EKENYK

SEQ ID NO: 9833 - protein, 6 aa, ARTIFICIAL SEQUENCE
  Synthetic Construct
EKEQAK

SEQ ID NO: 9834 - protein, 6 aa, ARTIFICIAL SEQUENCE
  Synthetic Construct
EKEQDK

SEQ ID NO: 9835 - protein, 6 aa, ARTIFICIAL SEQUENCE
  Synthetic Construct
EKEQEK

SEQ ID NO: 9836 - protein, 6 aa, ARTIFICIAL SEQUENCE
  Synthetic Construct
EKEQFK

SEQ ID NO: 9837 - protein, 6 aa, ARTIFICIAL SEQUENCE
  Synthetic Construct
EKEQGK

SEQ ID NO: 9838 - protein, 6 aa, ARTIFICIAL SEQUENCE
  Synthetic Construct
EKEQHK

SEQ ID NO: 9839 - protein, 6 aa, ARTIFICIAL SEQUENCE
  Synthetic Construct
EKEQIK

SEQ ID NO: 9840 - protein, 6 aa, ARTIFICIAL SEQUENCE
  Synthetic Construct
EKEQLK

SEQ ID NO: 9841 - protein, 6 aa, ARTIFICIAL SEQUENCE
  Synthetic Construct
EKEQNK

SEQ ID NO: 9842 - protein, 6 aa, ARTIFICIAL SEQUENCE
  Synthetic Construct
EKEQQK

SEQ ID NO: 9843 - protein, 6 aa, ARTIFICIAL SEQUENCE
  Synthetic Construct
EKEQRK

SEQ ID NO: 9844 - protein, 6 aa, ARTIFICIAL SEQUENCE
  Synthetic Construct
EKEQSK

SEQ ID NO: 9845 - protein, 6 aa, ARTIFICIAL SEQUENCE
  Synthetic Construct
EKEQTK

SEQ ID NO: 9846 - protein, 6 aa, ARTIFICIAL SEQUENCE
  Synthetic Construct
EKEQYK

SEQ ID NO: 9847 - protein, 6 aa, ARTIFICIAL SEQUENCE
  Synthetic Construct
EKERAK

SEQ ID NO: 9848 - protein, 6 aa, ARTIFICIAL SEQUENCE
  Synthetic Construct
EKERDK

SEQ ID NO: 9849 - protein, 6 aa, ARTIFICIAL SEQUENCE
  Synthetic Construct
EKEREK

SEQ ID NO: 9850 - protein, 6 aa, ARTIFICIAL SEQUENCE
  Synthetic Construct
EKERFK

SEQ ID NO: 9851 - protein, 6 aa, ARTIFICIAL SEQUENCE
  Synthetic Construct
EKERGK

SEQ ID NO: 9852 - protein, 6 aa, ARTIFICIAL SEQUENCE
  Synthetic Construct
EKERHK

SEQ ID NO: 9853 - protein, 6 aa, ARTIFICIAL SEQUENCE
  Synthetic Construct
EKERIK

SEQ ID NO: 9854 - protein, 6 aa, ARTIFICIAL SEQUENCE
  Synthetic Construct
EKERLK

SEQ ID NO: 9855 - protein, 6 aa, ARTIFICIAL SEQUENCE
  Synthetic Construct
EKERNK

SEQ ID NO: 9856 - protein, 6 aa, ARTIFICIAL SEQUENCE
  Synthetic Construct
EKERQK

SEQ ID NO: 9857 - protein, 6 aa, ARTIFICIAL SEQUENCE
  Synthetic Construct
EKERRK

SEQ ID NO: 9858 - protein, 6 aa, ARTIFICIAL SEQUENCE
  Synthetic Construct
EKERSK

SEQ ID NO: 9859 - protein, 6 aa, ARTIFICIAL SEQUENCE
  Synthetic Construct
EKERTK

SEQ ID NO: 9860 - protein, 6 aa, ARTIFICIAL SEQUENCE
  Synthetic Construct
EKERYK

SEQ ID NO: 9861 - protein, 6 aa, ARTIFICIAL SEQUENCE
  Synthetic Construct
EKESAK

SEQ ID NO: 9862 - protein, 6 aa, ARTIFICIAL SEQUENCE
  Synthetic Construct
EKESDK

SEQ ID NO: 9863 - protein, 6 aa, ARTIFICIAL SEQUENCE
  Synthetic Construct
EKESEK

SEQ ID NO: 9864 - protein, 6 aa, ARTIFICIAL SEQUENCE
  Synthetic Construct
EKESFK

SEQ ID NO: 9865 - protein, 6 aa, ARTIFICIAL SEQUENCE
  Synthetic Construct
EKESGK

SEQ ID NO: 9866 - protein, 6 aa, ARTIFICIAL SEQUENCE
  Synthetic Construct
EKESHK

SEQ ID NO: 9867 - protein, 6 aa, ARTIFICIAL SEQUENCE
  Synthetic Construct
EKESIK

SEQ ID NO: 9868 - protein, 6 aa, ARTIFICIAL SEQUENCE
  Synthetic Construct
EKESLK

SEQ ID NO: 9869 - protein, 6 aa, ARTIFICIAL SEQUENCE
  Synthetic Construct
EKESNK

SEQ ID NO: 9870 - protein, 6 aa, ARTIFICIAL SEQUENCE
  Synthetic Construct
EKESQK

SEQ ID NO: 9871 - protein, 6 aa, ARTIFICIAL SEQUENCE
  Synthetic Construct
EKESRK

SEQ ID NO: 9872 - protein, 6 aa, ARTIFICIAL SEQUENCE
  Synthetic Construct
EKESSK

SEQ ID NO: 9873 - protein, 6 aa, ARTIFICIAL SEQUENCE
  Synthetic Construct
EKESTK

SEQ ID NO: 9874 - protein, 6 aa, ARTIFICIAL SEQUENCE
  Synthetic Construct
EKESYK

SEQ ID NO: 9875 - protein, 6 aa, ARTIFICIAL SEQUENCE
  Synthetic Construct
EKETAK

SEQ ID NO: 9876 - protein, 6 aa, ARTIFICIAL SEQUENCE
  Synthetic Construct
EKETDK

SEQ ID NO: 9877 - protein, 6 aa, ARTIFICIAL SEQUENCE
  Synthetic Construct
EKETEK

SEQ ID NO: 9878 - protein, 6 aa, ARTIFICIAL SEQUENCE
  Synthetic Construct
EKETFK

SEQ ID NO: 9879 - protein, 6 aa, ARTIFICIAL SEQUENCE
  Synthetic Construct
EKETGK

SEQ ID NO: 9880 - protein, 6 aa, ARTIFICIAL SEQUENCE
  Synthetic Construct
EKETHK

SEQ ID NO: 9881 - protein, 6 aa, ARTIFICIAL SEQUENCE
  Synthetic Construct
EKETIK

SEQ ID NO: 9882 - protein, 6 aa, ARTIFICIAL SEQUENCE
  Synthetic Construct
EKETLK

SEQ ID NO: 9883 - protein, 6 aa, ARTIFICIAL SEQUENCE
  Synthetic Construct
EKETNK

SEQ ID NO: 9884 - protein, 6 aa, ARTIFICIAL SEQUENCE
  Synthetic Construct
EKETQK

SEQ ID NO: 9885 - protein, 6 aa, ARTIFICIAL SEQUENCE
  Synthetic Construct
EKETRK

SEQ ID NO: 9886 - protein, 6 aa, ARTIFICIAL SEQUENCE
  Synthetic Construct
EKETSK

SEQ ID NO: 9887 - protein, 6 aa, ARTIFICIAL SEQUENCE
  Synthetic Construct
EKETTK

SEQ ID NO: 9888 - protein, 6 aa, ARTIFICIAL SEQUENCE
  Synthetic Construct
EKETYK

SEQ ID NO: 9889 - protein, 6 aa, ARTIFICIAL SEQUENCE
  Synthetic Construct
EKEYAK

SEQ ID NO: 9890 - protein, 6 aa, ARTIFICIAL SEQUENCE
  Synthetic Construct
EKEYDK

SEQ ID NO: 9891 - protein, 6 aa, ARTIFICIAL SEQUENCE
  Synthetic Construct
EKEYEK

SEQ ID NO: 9892 - protein, 6 aa, ARTIFICIAL SEQUENCE
  Synthetic Construct
EKEYFK

SEQ ID NO: 9893 - protein, 6 aa, ARTIFICIAL SEQUENCE
  Synthetic Construct
EKEYGK

SEQ ID NO: 9894 - protein, 6 aa, ARTIFICIAL SEQUENCE
  Synthetic Construct
EKEYHK

SEQ ID NO: 9895 - protein, 6 aa, ARTIFICIAL SEQUENCE
  Synthetic Construct
EKEYIK

SEQ ID NO: 9896 - protein, 6 aa, ARTIFICIAL SEQUENCE
  Synthetic Construct
EKEYLK

SEQ ID NO: 9897 - protein, 6 aa, ARTIFICIAL SEQUENCE
  Synthetic Construct
EKEYNK

SEQ ID NO: 9898 - protein, 6 aa, ARTIFICIAL SEQUENCE
  Synthetic Construct
EKEYQK

SEQ ID NO: 9899 - protein, 6 aa, ARTIFICIAL SEQUENCE
  Synthetic Construct
EKEYRK

SEQ ID NO: 9900 - protein, 6 aa, ARTIFICIAL SEQUENCE
  Synthetic Construct
EKEYSK

SEQ ID NO: 9901 - protein, 6 aa, ARTIFICIAL SEQUENCE
  Synthetic Construct
EKEYTK

SEQ ID NO: 9902 - protein, 6 aa, ARTIFICIAL SEQUENCE
  Synthetic Construct
EKEYYK

SEQ ID NO: 9903 - protein, 6 aa, ARTIFICIAL SEQUENCE
  Synthetic Construct
EKFAAK

SEQ ID NO: 9904 - protein, 6 aa, ARTIFICIAL SEQUENCE
  Synthetic Construct
EKFADK

SEQ ID NO: 9905 - protein, 6 aa, ARTIFICIAL SEQUENCE
  Synthetic Construct
EKFAEK

SEQ ID NO: 9906 - protein, 6 aa, ARTIFICIAL SEQUENCE
  Synthetic Construct
EKFAFK

SEQ ID NO: 9907 - protein, 6 aa, ARTIFICIAL SEQUENCE
  Synthetic Construct
EKFAGK

SEQ ID NO: 9908 - protein, 6 aa, ARTIFICIAL SEQUENCE
  Synthetic Construct
EKFAHK

SEQ ID NO: 9909 - protein, 6 aa, ARTIFICIAL SEQUENCE
  Synthetic Construct
EKFAIK

SEQ ID NO: 9910 - protein, 6 aa, ARTIFICIAL SEQUENCE
  Synthetic Construct
EKFALK

SEQ ID NO: 9911 - protein, 6 aa, ARTIFICIAL SEQUENCE
  Synthetic Construct
EKFANK

SEQ ID NO: 9912 - protein, 6 aa, ARTIFICIAL SEQUENCE
  Synthetic Construct
EKFAQK

SEQ ID NO: 9913 - protein, 6 aa, ARTIFICIAL SEQUENCE
  Synthetic Construct
EKFARK

SEQ ID NO: 9914 - protein, 6 aa, ARTIFICIAL SEQUENCE
  Synthetic Construct
EKFASK

SEQ ID NO: 9915 - protein, 6 aa, ARTIFICIAL SEQUENCE
  Synthetic Construct
EKFATK

SEQ ID NO: 9916 - protein, 6 aa, ARTIFICIAL SEQUENCE
  Synthetic Construct
EKFAYK

SEQ ID NO: 9917 - protein, 6 aa, ARTIFICIAL SEQUENCE
  Synthetic Construct
EKFDAK

SEQ ID NO: 9918 - protein, 6 aa, ARTIFICIAL SEQUENCE
  Synthetic Construct
EKFDDK

SEQ ID NO: 9919 - protein, 6 aa, ARTIFICIAL SEQUENCE
  Synthetic Construct
EKFDEK

SEQ ID NO: 9920 - protein, 6 aa, ARTIFICIAL SEQUENCE
  Synthetic Construct
EKFDFK

SEQ ID NO: 9921 - protein, 6 aa, ARTIFICIAL SEQUENCE
  Synthetic Construct
EKFDGK

SEQ ID NO: 9922 - protein, 6 aa, ARTIFICIAL SEQUENCE
  Synthetic Construct
EKFDHK

SEQ ID NO: 9923 - protein, 6 aa, ARTIFICIAL SEQUENCE
  Synthetic Construct
EKFDIK

SEQ ID NO: 9924 - protein, 6 aa, ARTIFICIAL SEQUENCE
  Synthetic Construct
EKFDLK

SEQ ID NO: 9925 - protein, 6 aa, ARTIFICIAL SEQUENCE
  Synthetic Construct
EKFDNK

SEQ ID NO: 9926 - protein, 6 aa, ARTIFICIAL SEQUENCE
  Synthetic Construct
EKFDQK

SEQ ID NO: 9927 - protein, 6 aa, ARTIFICIAL SEQUENCE
  Synthetic Construct
EKFDRK

SEQ ID NO: 9928 - protein, 6 aa, ARTIFICIAL SEQUENCE
  Synthetic Construct
EKFDSK

SEQ ID NO: 9929 - protein, 6 aa, ARTIFICIAL SEQUENCE
  Synthetic Construct
EKFDTK

SEQ ID NO: 9930 - protein, 6 aa, ARTIFICIAL SEQUENCE
  Synthetic Construct
EKFDYK

SEQ ID NO: 9931 - protein, 6 aa, ARTIFICIAL SEQUENCE
  Synthetic Construct
EKFEAK

SEQ ID NO: 9932 - protein, 6 aa, ARTIFICIAL SEQUENCE
  Synthetic Construct
EKFEDK

SEQ ID NO: 9933 - protein, 6 aa, ARTIFICIAL SEQUENCE
  Synthetic Construct
EKFEEK

SEQ ID NO: 9934 - protein, 6 aa, ARTIFICIAL SEQUENCE
  Synthetic Construct
EKFEFK

SEQ ID NO: 9935 - protein, 6 aa, ARTIFICIAL SEQUENCE
  Synthetic Construct
EKFEGK

SEQ ID NO: 9936 - protein, 6 aa, ARTIFICIAL SEQUENCE
  Synthetic Construct
EKFEHK

SEQ ID NO: 9937 - protein, 6 aa, ARTIFICIAL SEQUENCE
  Synthetic Construct
EKFEIK

SEQ ID NO: 9938 - protein, 6 aa, ARTIFICIAL SEQUENCE
  Synthetic Construct
EKFELK

SEQ ID NO: 9939 - protein, 6 aa, ARTIFICIAL SEQUENCE
  Synthetic Construct
EKFENK

SEQ ID NO: 9940 - protein, 6 aa, ARTIFICIAL SEQUENCE
  Synthetic Construct
EKFEQK

SEQ ID NO: 9941 - protein, 6 aa, ARTIFICIAL SEQUENCE
  Synthetic Construct
EKFERK

SEQ ID NO: 9942 - protein, 6 aa, ARTIFICIAL SEQUENCE
  Synthetic Construct
EKFESK

SEQ ID NO: 9943 - protein, 6 aa, ARTIFICIAL SEQUENCE
  Synthetic Construct
EKFETK

SEQ ID NO: 9944 - protein, 6 aa, ARTIFICIAL SEQUENCE
  Synthetic Construct
EKFEYK

SEQ ID NO: 9945 - protein, 6 aa, ARTIFICIAL SEQUENCE
  Synthetic Construct
EKFFAK

SEQ ID NO: 9946 - protein, 6 aa, ARTIFICIAL SEQUENCE
  Synthetic Construct
EKFFDK

SEQ ID NO: 9947 - protein, 6 aa, ARTIFICIAL SEQUENCE
  Synthetic Construct
EKFFEK

SEQ ID NO: 9948 - protein, 6 aa, ARTIFICIAL SEQUENCE
  Synthetic Construct
EKFFFK

SEQ ID NO: 9949 - protein, 6 aa, ARTIFICIAL SEQUENCE
  Synthetic Construct
EKFFGK

SEQ ID NO: 9950 - protein, 6 aa, ARTIFICIAL SEQUENCE
  Synthetic Construct
EKFFHK

SEQ ID NO: 9951 - protein, 6 aa, ARTIFICIAL SEQUENCE
  Synthetic Construct
EKFFIK

SEQ ID NO: 9952 - protein, 6 aa, ARTIFICIAL SEQUENCE
  Synthetic Construct
EKFFLK

SEQ ID NO: 9953 - protein, 6 aa, ARTIFICIAL SEQUENCE
  Synthetic Construct
EKFFNK

SEQ ID NO: 9954 - protein, 6 aa, ARTIFICIAL SEQUENCE
  Synthetic Construct
EKFFQK

SEQ ID NO: 9955 - protein, 6 aa, ARTIFICIAL SEQUENCE
  Synthetic Construct
EKFFRK

SEQ ID NO: 9956 - protein, 6 aa, ARTIFICIAL SEQUENCE
  Synthetic Construct
EKFFSK

SEQ ID NO: 9957 - protein, 6 aa, ARTIFICIAL SEQUENCE
  Synthetic Construct
EKFFTK

SEQ ID NO: 9958 - protein, 6 aa, ARTIFICIAL SEQUENCE
  Synthetic Construct
EKFFYK

SEQ ID NO: 9959 - protein, 6 aa, ARTIFICIAL SEQUENCE
  Synthetic Construct
EKFGAK

SEQ ID NO: 9960 - protein, 6 aa, ARTIFICIAL SEQUENCE
  Synthetic Construct
EKFGDK

SEQ ID NO: 9961 - protein, 6 aa, ARTIFICIAL SEQUENCE
  Synthetic Construct
EKFGEK

SEQ ID NO: 9962 - protein, 6 aa, ARTIFICIAL SEQUENCE
  Synthetic Construct
EKFGFK

SEQ ID NO: 9963 - protein, 6 aa, ARTIFICIAL SEQUENCE
  Synthetic Construct
EKFGGK

SEQ ID NO: 9964 - protein, 6 aa, ARTIFICIAL SEQUENCE
  Synthetic Construct
EKFGHK

SEQ ID NO: 9965 - protein, 6 aa, ARTIFICIAL SEQUENCE
  Synthetic Construct
EKFGIK

SEQ ID NO: 9966 - protein, 6 aa, ARTIFICIAL SEQUENCE
  Synthetic Construct
EKFGLK

SEQ ID NO: 9967 - protein, 6 aa, ARTIFICIAL SEQUENCE
  Synthetic Construct
EKFGNK

SEQ ID NO: 9968 - protein, 6 aa, ARTIFICIAL SEQUENCE
  Synthetic Construct
EKFGQK

SEQ ID NO: 9969 - protein, 6 aa, ARTIFICIAL SEQUENCE
  Synthetic Construct
EKFGRK

SEQ ID NO: 9970 - protein, 6 aa, ARTIFICIAL SEQUENCE
  Synthetic Construct
EKFGSK

SEQ ID NO: 9971 - protein, 6 aa, ARTIFICIAL SEQUENCE
  Synthetic Construct
EKFGTK

SEQ ID NO: 9972 - protein, 6 aa, ARTIFICIAL SEQUENCE
  Synthetic Construct
EKFGYK

SEQ ID NO: 9973 - protein, 6 aa, ARTIFICIAL SEQUENCE
  Synthetic Construct
EKFHAK

SEQ ID NO: 9974 - protein, 6 aa, ARTIFICIAL SEQUENCE
  Synthetic Construct
EKFHDK

SEQ ID NO: 9975 - protein, 6 aa, ARTIFICIAL SEQUENCE
  Synthetic Construct
EKFHEK

SEQ ID NO: 9976 - protein, 6 aa, ARTIFICIAL SEQUENCE
  Synthetic Construct
EKFHFK

SEQ ID NO: 9977 - protein, 6 aa, ARTIFICIAL SEQUENCE
  Synthetic Construct
EKFHGK

SEQ ID NO: 9978 - protein, 6 aa, ARTIFICIAL SEQUENCE
  Synthetic Construct
EKFHHK

SEQ ID NO: 9979 - protein, 6 aa, ARTIFICIAL SEQUENCE
  Synthetic Construct
EKFHIK

SEQ ID NO: 9980 - protein, 6 aa, ARTIFICIAL SEQUENCE
  Synthetic Construct
EKFHLK

SEQ ID NO: 9981 - protein, 6 aa, ARTIFICIAL SEQUENCE
  Synthetic Construct
EKFHNK

SEQ ID NO: 9982 - protein, 6 aa, ARTIFICIAL SEQUENCE
  Synthetic Construct
EKFHQK

SEQ ID NO: 9983 - protein, 6 aa, ARTIFICIAL SEQUENCE
  Synthetic Construct
EKFHRK

SEQ ID NO: 9984 - protein, 6 aa, ARTIFICIAL SEQUENCE
  Synthetic Construct
EKFHSK

SEQ ID NO: 9985 - protein, 6 aa, ARTIFICIAL SEQUENCE
  Synthetic Construct
EKFHTK

SEQ ID NO: 9986 - protein, 6 aa, ARTIFICIAL SEQUENCE
  Synthetic Construct
EKFHYK

SEQ ID NO: 9987 - protein, 6 aa, ARTIFICIAL SEQUENCE
  Synthetic Construct
EKFIAK

SEQ ID NO: 9988 - protein, 6 aa, ARTIFICIAL SEQUENCE
  Synthetic Construct
EKFIDK

SEQ ID NO: 9989 - protein, 6 aa, ARTIFICIAL SEQUENCE
  Synthetic Construct
EKFIEK

SEQ ID NO: 9990 - protein, 6 aa, ARTIFICIAL SEQUENCE
  Synthetic Construct
EKFIFK

SEQ ID NO: 9991 - protein, 6 aa, ARTIFICIAL SEQUENCE
  Synthetic Construct
EKFIGK

SEQ ID NO: 9992 - protein, 6 aa, ARTIFICIAL SEQUENCE
  Synthetic Construct
EKFIHK

SEQ ID NO: 9993 - protein, 6 aa, ARTIFICIAL SEQUENCE
  Synthetic Construct
EKFIIK

SEQ ID NO: 9994 - protein, 6 aa, ARTIFICIAL SEQUENCE
  Synthetic Construct
EKFILK

SEQ ID NO: 9995 - protein, 6 aa, ARTIFICIAL SEQUENCE
  Synthetic Construct
EKFINK

SEQ ID NO: 9996 - protein, 6 aa, ARTIFICIAL SEQUENCE
  Synthetic Construct
EKFIQK

SEQ ID NO: 9997 - protein, 6 aa, ARTIFICIAL SEQUENCE
  Synthetic Construct
EKFIRK

SEQ ID NO: 9998 - protein, 6 aa, ARTIFICIAL SEQUENCE
  Synthetic Construct
EKFISK

SEQ ID NO: 9999 - protein, 6 aa, ARTIFICIAL SEQUENCE
  Synthetic Construct
EKFITK

SEQ ID NO: 10000 - protein, 6 aa, ARTIFICIAL SEQUENCE
  Synthetic Construct
EKFIYK

SEQ ID NO: 10001 - protein, 6 aa, ARTIFICIAL SEQUENCE
  Synthetic Construct
EKFLAK

SEQ ID NO: 10002 - protein, 6 aa, ARTIFICIAL SEQUENCE
  Synthetic Construct
EKFLDK

SEQ ID NO: 10003 - protein, 6 aa, ARTIFICIAL SEQUENCE
  Synthetic Construct
EKFLEK

SEQ ID NO: 10004 - protein, 6 aa, ARTIFICIAL SEQUENCE
  Synthetic Construct
EKFLFK

SEQ ID NO: 10005 - protein, 6 aa, ARTIFICIAL SEQUENCE
  Synthetic Construct
EKFLGK

SEQ ID NO: 10006 - protein, 6 aa, ARTIFICIAL SEQUENCE
  Synthetic Construct
EKFLHK

SEQ ID NO: 10007 - protein, 6 aa, ARTIFICIAL SEQUENCE
  Synthetic Construct
EKFLIK

SEQ ID NO: 10008 - protein, 6 aa, ARTIFICIAL SEQUENCE
  Synthetic Construct
EKFLLK

SEQ ID NO: 10009 - protein, 6 aa, ARTIFICIAL SEQUENCE
  Synthetic Construct
EKFLNK

SEQ ID NO: 10010 - protein, 6 aa, ARTIFICIAL SEQUENCE
  Synthetic Construct
EKFLQK

SEQ ID NO: 10011 - protein, 6 aa, ARTIFICIAL SEQUENCE
  Synthetic Construct
EKFLRK

SEQ ID NO: 10012 - protein, 6 aa, ARTIFICIAL SEQUENCE
  Synthetic Construct
EKFLSK

SEQ ID NO: 10013 - protein, 6 aa, ARTIFICIAL SEQUENCE
  Synthetic Construct
EKFLTK

SEQ ID NO: 10014 - protein, 6 aa, ARTIFICIAL SEQUENCE
  Synthetic Construct
EKFLYK

SEQ ID NO: 10015 - protein, 6 aa, ARTIFICIAL SEQUENCE
  Synthetic Construct
EKFNAK

SEQ ID NO: 10016 - protein, 6 aa, ARTIFICIAL SEQUENCE
  Synthetic Construct
EKFNDK

SEQ ID NO: 10017 - protein, 6 aa, ARTIFICIAL SEQUENCE
  Synthetic Construct
EKFNEK

SEQ ID NO: 10018 - protein, 6 aa, ARTIFICIAL SEQUENCE
  Synthetic Construct
EKFNFK

SEQ ID NO: 10019 - protein, 6 aa, ARTIFICIAL SEQUENCE
  Synthetic Construct
EKFNGK

SEQ ID NO: 10020 - protein, 6 aa, ARTIFICIAL SEQUENCE
  Synthetic Construct
EKFNHK

SEQ ID NO: 10021 - protein, 6 aa, ARTIFICIAL SEQUENCE
  Synthetic Construct
EKFNIK

SEQ ID NO: 10022 - protein, 6 aa, ARTIFICIAL SEQUENCE
  Synthetic Construct
EKFNLK

SEQ ID NO: 10023 - protein, 6 aa, ARTIFICIAL SEQUENCE
  Synthetic Construct
EKFNNK

SEQ ID NO: 10024 - protein, 6 aa, ARTIFICIAL SEQUENCE
  Synthetic Construct
EKFNQK

SEQ ID NO: 10025 - protein, 6 aa, ARTIFICIAL SEQUENCE
  Synthetic Construct
EKFNRK

SEQ ID NO: 10026 - protein, 6 aa, ARTIFICIAL SEQUENCE
  Synthetic Construct
EKFNSK

SEQ ID NO: 10027 - protein, 6 aa, ARTIFICIAL SEQUENCE
  Synthetic Construct
EKFNTK

SEQ ID NO: 10028 - protein, 6 aa, ARTIFICIAL SEQUENCE
  Synthetic Construct
EKFNYK

SEQ ID NO: 10029 - protein, 6 aa, ARTIFICIAL SEQUENCE
  Synthetic Construct
EKFQAK

SEQ ID NO: 10030 - protein, 6 aa, ARTIFICIAL SEQUENCE
  Synthetic Construct
EKFQDK

SEQ ID NO: 10031 - protein, 6 aa, ARTIFICIAL SEQUENCE
  Synthetic Construct
EKFQEK

SEQ ID NO: 10032 - protein, 6 aa, ARTIFICIAL SEQUENCE
  Synthetic Construct
EKFQFK

SEQ ID NO: 10033 - protein, 6 aa, ARTIFICIAL SEQUENCE
  Synthetic Construct
EKFQGK

SEQ ID NO: 10034 - protein, 6 aa, ARTIFICIAL SEQUENCE
  Synthetic Construct
EKFQHK

SEQ ID NO: 10035 - protein, 6 aa, ARTIFICIAL SEQUENCE
  Synthetic Construct
EKFQIK

SEQ ID NO: 10036 - protein, 6 aa, ARTIFICIAL SEQUENCE
  Synthetic Construct
EKFQLK

SEQ ID NO: 10037 - protein, 6 aa, ARTIFICIAL SEQUENCE
  Synthetic Construct
EKFQNK

SEQ ID NO: 10038 - protein, 6 aa, ARTIFICIAL SEQUENCE
  Synthetic Construct
EKFQQK

SEQ ID NO: 10039 - protein, 6 aa, ARTIFICIAL SEQUENCE
  Synthetic Construct
EKFQRK

SEQ ID NO: 10040 - protein, 6 aa, ARTIFICIAL SEQUENCE
  Synthetic Construct
EKFQSK

SEQ ID NO: 10041 - protein, 6 aa, ARTIFICIAL SEQUENCE
  Synthetic Construct
EKFQTK

SEQ ID NO: 10042 - protein, 6 aa, ARTIFICIAL SEQUENCE
  Synthetic Construct
EKFQYK

SEQ ID NO: 10043 - protein, 6 aa, ARTIFICIAL SEQUENCE
  Synthetic Construct
EKFRAK

SEQ ID NO: 10044 - protein, 6 aa, ARTIFICIAL SEQUENCE
  Synthetic Construct
EKFRDK

SEQ ID NO: 10045 - protein, 6 aa, ARTIFICIAL SEQUENCE
  Synthetic Construct
EKFREK

SEQ ID NO: 10046 - protein, 6 aa, ARTIFICIAL SEQUENCE
  Synthetic Construct
EKFRFK

SEQ ID NO: 10047 - protein, 6 aa, ARTIFICIAL SEQUENCE
  Synthetic Construct
EKFRGK

SEQ ID NO: 10048 - protein, 6 aa, ARTIFICIAL SEQUENCE
  Synthetic Construct
EKFRHK

SEQ ID NO: 10049 - protein, 6 aa, ARTIFICIAL SEQUENCE
  Synthetic Construct
EKFRIK

SEQ ID NO: 10050 - protein, 6 aa, ARTIFICIAL SEQUENCE
  Synthetic Construct
EKFRLK

SEQ ID NO: 10051 - protein, 6 aa, ARTIFICIAL SEQUENCE
  Synthetic Construct
EKFRNK

SEQ ID NO: 10052 - protein, 6 aa, ARTIFICIAL SEQUENCE
  Synthetic Construct
EKFRQK

SEQ ID NO: 10053 - protein, 6 aa, ARTIFICIAL SEQUENCE
  Synthetic Construct
EKFRRK

SEQ ID NO: 10054 - protein, 6 aa, ARTIFICIAL SEQUENCE
  Synthetic Construct
EKFRSK

SEQ ID NO: 10055 - protein, 6 aa, ARTIFICIAL SEQUENCE
  Synthetic Construct
EKFRTK

SEQ ID NO: 10056 - protein, 6 aa, ARTIFICIAL SEQUENCE
  Synthetic Construct
EKFRYK

SEQ ID NO: 10057 - protein, 6 aa, ARTIFICIAL SEQUENCE
  Synthetic Construct
EKFSAK

SEQ ID NO: 10058 - protein, 6 aa, ARTIFICIAL SEQUENCE
  Synthetic Construct
EKFSDK

SEQ ID NO: 10059 - protein, 6 aa, ARTIFICIAL SEQUENCE
  Synthetic Construct
EKFSEK

SEQ ID NO: 10060 - protein, 6 aa, ARTIFICIAL SEQUENCE
  Synthetic Construct
EKFSFK

SEQ ID NO: 10061 - protein, 6 aa, ARTIFICIAL SEQUENCE
  Synthetic Construct
EKFSGK

SEQ ID NO: 10062 - protein, 6 aa, ARTIFICIAL SEQUENCE
  Synthetic Construct
EKFSHK

SEQ ID NO: 10063 - protein, 6 aa, ARTIFICIAL SEQUENCE
  Synthetic Construct
EKFSIK

SEQ ID NO: 10064 - protein, 6 aa, ARTIFICIAL SEQUENCE
  Synthetic Construct
EKFSLK

SEQ ID NO: 10065 - protein, 6 aa, ARTIFICIAL SEQUENCE
  Synthetic Construct
EKFSNK

SEQ ID NO: 10066 - protein, 6 aa, ARTIFICIAL SEQUENCE
  Synthetic Construct
EKFSQK

SEQ ID NO: 10067 - protein, 6 aa, ARTIFICIAL SEQUENCE
  Synthetic Construct
EKFSRK

SEQ ID NO: 10068 - protein, 6 aa, ARTIFICIAL SEQUENCE
  Synthetic Construct
EKFSSK

SEQ ID NO: 10069 - protein, 6 aa, ARTIFICIAL SEQUENCE
  Synthetic Construct
EKFSTK

SEQ ID NO: 10070 - protein, 6 aa, ARTIFICIAL SEQUENCE
  Synthetic Construct
EKFSYK

SEQ ID NO: 10071 - protein, 6 aa, ARTIFICIAL SEQUENCE
  Synthetic Construct
EKFTAK

SEQ ID NO: 10072 - protein, 6 aa, ARTIFICIAL SEQUENCE
  Synthetic Construct
EKFTDK

SEQ ID NO: 10073 - protein, 6 aa, ARTIFICIAL SEQUENCE
  Synthetic Construct
EKFTEK

SEQ ID NO: 10074 - protein, 6 aa, ARTIFICIAL SEQUENCE
  Synthetic Construct
EKFTFK

SEQ ID NO: 10075 - protein, 6 aa, ARTIFICIAL SEQUENCE
  Synthetic Construct
EKFTGK

SEQ ID NO: 10076 - protein, 6 aa, ARTIFICIAL SEQUENCE
  Synthetic Construct
EKFTHK

SEQ ID NO: 10077 - protein, 6 aa, ARTIFICIAL SEQUENCE
  Synthetic Construct
EKFTIK

SEQ ID NO: 10078 - protein, 6 aa, ARTIFICIAL SEQUENCE
  Synthetic Construct
EKFTLK

SEQ ID NO: 10079 - protein, 6 aa, ARTIFICIAL SEQUENCE
  Synthetic Construct
EKFTNK

SEQ ID NO: 10080 - protein, 6 aa, ARTIFICIAL SEQUENCE
  Synthetic Construct
EKFTQK

SEQ ID NO: 10081 - protein, 6 aa, ARTIFICIAL SEQUENCE
  Synthetic Construct
EKFTRK

SEQ ID NO: 10082 - protein, 6 aa, ARTIFICIAL SEQUENCE
  Synthetic Construct
EKFTSK

SEQ ID NO: 10083 - protein, 6 aa, ARTIFICIAL SEQUENCE
  Synthetic Construct
EKFTTK

SEQ ID NO: 10084 - protein, 6 aa, ARTIFICIAL SEQUENCE
  Synthetic Construct
EKFTYK

SEQ ID NO: 10085 - protein, 6 aa, ARTIFICIAL SEQUENCE
  Synthetic Construct
EKFYAK

SEQ ID NO: 10086 - protein, 6 aa, ARTIFICIAL SEQUENCE
  Synthetic Construct
EKFYDK

SEQ ID NO: 10087 - protein, 6 aa, ARTIFICIAL SEQUENCE
  Synthetic Construct
EKFYEK

SEQ ID NO: 10088 - protein, 6 aa, ARTIFICIAL SEQUENCE
  Synthetic Construct
EKFYFK

SEQ ID NO: 10089 - protein, 6 aa, ARTIFICIAL SEQUENCE
  Synthetic Construct
EKFYGK

SEQ ID NO: 10090 - protein, 6 aa, ARTIFICIAL SEQUENCE
  Synthetic Construct
EKFYHK

SEQ ID NO: 10091 - protein, 6 aa, ARTIFICIAL SEQUENCE
  Synthetic Construct
EKFYIK

SEQ ID NO: 10092 - protein, 6 aa, ARTIFICIAL SEQUENCE
  Synthetic Construct
EKFYLK

SEQ ID NO: 10093 - protein, 6 aa, ARTIFICIAL SEQUENCE
  Synthetic Construct
EKFYNK

SEQ ID NO: 10094 - protein, 6 aa, ARTIFICIAL SEQUENCE
  Synthetic Construct
EKFYQK

SEQ ID NO: 10095 - protein, 6 aa, ARTIFICIAL SEQUENCE
  Synthetic Construct
EKFYRK

SEQ ID NO: 10096 - protein, 6 aa, ARTIFICIAL SEQUENCE
  Synthetic Construct
EKFYSK

SEQ ID NO: 10097 - protein, 6 aa, ARTIFICIAL SEQUENCE
  Synthetic Construct
EKFYTK

SEQ ID NO: 10098 - protein, 6 aa, ARTIFICIAL SEQUENCE
  Synthetic Construct
EKFYYK

SEQ ID NO: 10099 - protein, 6 aa, ARTIFICIAL SEQUENCE
  Synthetic Construct
EKGAAK

SEQ ID NO: 10100 - protein, 6 aa, ARTIFICIAL SEQUENCE
  Synthetic Construct
EKGADK

SEQ ID NO: 10101 - protein, 6 aa, ARTIFICIAL SEQUENCE
  Synthetic Construct
EKGAEK

SEQ ID NO: 10102 - protein, 6 aa, ARTIFICIAL SEQUENCE
  Synthetic Construct
EKGAFK

SEQ ID NO: 10103 - protein, 6 aa, ARTIFICIAL SEQUENCE
  Synthetic Construct
EKGAGK

SEQ ID NO: 10104 - protein, 6 aa, ARTIFICIAL SEQUENCE
  Synthetic Construct
EKGAHK

SEQ ID NO: 10105 - protein, 6 aa, ARTIFICIAL SEQUENCE
  Synthetic Construct
EKGAIK

SEQ ID NO: 10106 - protein, 6 aa, ARTIFICIAL SEQUENCE
  Synthetic Construct
EKGALK

SEQ ID NO: 10107 - protein, 6 aa, ARTIFICIAL SEQUENCE
  Synthetic Construct
EKGANK

SEQ ID NO: 10108 - protein, 6 aa, ARTIFICIAL SEQUENCE
  Synthetic Construct
EKGAQK

SEQ ID NO: 10109 - protein, 6 aa, ARTIFICIAL SEQUENCE
  Synthetic Construct
EKGARK

SEQ ID NO: 10110 - protein, 6 aa, ARTIFICIAL SEQUENCE
  Synthetic Construct
EKGASK

SEQ ID NO: 10111 - protein, 6 aa, ARTIFICIAL SEQUENCE
  Synthetic Construct
EKGATK

SEQ ID NO: 10112 - protein, 6 aa, ARTIFICIAL SEQUENCE
  Synthetic Construct
EKGAYK

SEQ ID NO: 10113 - protein, 6 aa, ARTIFICIAL SEQUENCE
  Synthetic Construct
EKGDAK

SEQ ID NO: 10114 - protein, 6 aa, ARTIFICIAL SEQUENCE
  Synthetic Construct
EKGDDK

SEQ ID NO: 10115 - protein, 6 aa, ARTIFICIAL SEQUENCE
  Synthetic Construct
EKGDEK

SEQ ID NO: 10116 - protein, 6 aa, ARTIFICIAL SEQUENCE
  Synthetic Construct
EKGDFK

SEQ ID NO: 10117 - protein, 6 aa, ARTIFICIAL SEQUENCE
  Synthetic Construct
EKGDGK

SEQ ID NO: 10118 - protein, 6 aa, ARTIFICIAL SEQUENCE
  Synthetic Construct
EKGDHK

SEQ ID NO: 10119 - protein, 6 aa, ARTIFICIAL SEQUENCE
  Synthetic Construct
EKGDIK

SEQ ID NO: 10120 - protein, 6 aa, ARTIFICIAL SEQUENCE
  Synthetic Construct
EKGDLK

SEQ ID NO: 10121 - protein, 6 aa, ARTIFICIAL SEQUENCE
  Synthetic Construct
EKGDNK

SEQ ID NO: 10122 - protein, 6 aa, ARTIFICIAL SEQUENCE
  Synthetic Construct
EKGDQK

SEQ ID NO: 10123 - protein, 6 aa, ARTIFICIAL SEQUENCE
  Synthetic Construct
EKGDRK

SEQ ID NO: 10124 - protein, 6 aa, ARTIFICIAL SEQUENCE
  Synthetic Construct
EKGDSK

SEQ ID NO: 10125 - protein, 6 aa, ARTIFICIAL SEQUENCE
  Synthetic Construct
EKGDTK

SEQ ID NO: 10126 - protein, 6 aa, ARTIFICIAL SEQUENCE
  Synthetic Construct
EKGDYK

SEQ ID NO: 10127 - protein, 6 aa, ARTIFICIAL SEQUENCE
  Synthetic Construct
EKGEAK

SEQ ID NO: 10128 - protein, 6 aa, ARTIFICIAL SEQUENCE
  Synthetic Construct
EKGEDK

SEQ ID NO: 10129 - protein, 6 aa, ARTIFICIAL SEQUENCE
  Synthetic Construct
EKGEEK

SEQ ID NO: 10130 - protein, 6 aa, ARTIFICIAL SEQUENCE
  Synthetic Construct
EKGEFK

SEQ ID NO: 10131 - protein, 6 aa, ARTIFICIAL SEQUENCE
  Synthetic Construct
EKGEGK

SEQ ID NO: 10132 - protein, 6 aa, ARTIFICIAL SEQUENCE
  Synthetic Construct
EKGEHK

SEQ ID NO: 10133 - protein, 6 aa, ARTIFICIAL SEQUENCE
  Synthetic Construct
EKGEIK

SEQ ID NO: 10134 - protein, 6 aa, ARTIFICIAL SEQUENCE
  Synthetic Construct
EKGELK

SEQ ID NO: 10135 - protein, 6 aa, ARTIFICIAL SEQUENCE
  Synthetic Construct
EKGENK

SEQ ID NO: 10136 - protein, 6 aa, ARTIFICIAL SEQUENCE
  Synthetic Construct
EKGEQK

SEQ ID NO: 10137 - protein, 6 aa, ARTIFICIAL SEQUENCE
  Synthetic Construct
EKGERK

SEQ ID NO: 10138 - protein, 6 aa, ARTIFICIAL SEQUENCE
  Synthetic Construct
EKGESK

SEQ ID NO: 10139 - protein, 6 aa, ARTIFICIAL SEQUENCE
  Synthetic Construct
EKGETK

SEQ ID NO: 10140 - protein, 6 aa, ARTIFICIAL SEQUENCE
  Synthetic Construct
EKGEYK

SEQ ID NO: 10141 - protein, 6 aa, ARTIFICIAL SEQUENCE
  Synthetic Construct
EKGFAK

SEQ ID NO: 10142 - protein, 6 aa, ARTIFICIAL SEQUENCE
  Synthetic Construct
EKGFDK

SEQ ID NO: 10143 - protein, 6 aa, ARTIFICIAL SEQUENCE
  Synthetic Construct
EKGFEK

SEQ ID NO: 10144 - protein, 6 aa, ARTIFICIAL SEQUENCE
  Synthetic Construct
EKGFFK

SEQ ID NO: 10145 - protein, 6 aa, ARTIFICIAL SEQUENCE
  Synthetic Construct
EKGFGK

SEQ ID NO: 10146 - protein, 6 aa, ARTIFICIAL SEQUENCE
  Synthetic Construct
EKGFHK

SEQ ID NO: 10147 - protein, 6 aa, ARTIFICIAL SEQUENCE
  Synthetic Construct
EKGFIK

SEQ ID NO: 10148 - protein, 6 aa, ARTIFICIAL SEQUENCE
  Synthetic Construct
EKGFLK

SEQ ID NO: 10149 - protein, 6 aa, ARTIFICIAL SEQUENCE
  Synthetic Construct
EKGFNK

SEQ ID NO: 10150 - protein, 6 aa, ARTIFICIAL SEQUENCE
  Synthetic Construct
EKGFQK

SEQ ID NO: 10151 - protein, 6 aa, ARTIFICIAL SEQUENCE
  Synthetic Construct
EKGFRK

SEQ ID NO: 10152 - protein, 6 aa, ARTIFICIAL SEQUENCE
  Synthetic Construct
EKGFSK

SEQ ID NO: 10153 - protein, 6 aa, ARTIFICIAL SEQUENCE
  Synthetic Construct
EKGFTK

SEQ ID NO: 10154 - protein, 6 aa, ARTIFICIAL SEQUENCE
  Synthetic Construct
EKGFYK

SEQ ID NO: 10155 - protein, 6 aa, ARTIFICIAL SEQUENCE
  Synthetic Construct
EKGGAK

SEQ ID NO: 10156 - protein, 6 aa, ARTIFICIAL SEQUENCE
  Synthetic Construct
EKGGDK

SEQ ID NO: 10157 - protein, 6 aa, ARTIFICIAL SEQUENCE
  Synthetic Construct
EKGGEK

SEQ ID NO: 10158 - protein, 6 aa, ARTIFICIAL SEQUENCE
  Synthetic Construct
EKGGFK

SEQ ID NO: 10159 - protein, 6 aa, ARTIFICIAL SEQUENCE
  Synthetic Construct
EKGGGK

SEQ ID NO: 10160 - protein, 6 aa, ARTIFICIAL SEQUENCE
  Synthetic Construct
EKGGHK

SEQ ID NO: 10161 - protein, 6 aa, ARTIFICIAL SEQUENCE
  Synthetic Construct
EKGGIK

SEQ ID NO: 10162 - protein, 6 aa, ARTIFICIAL SEQUENCE
  Synthetic Construct
EKGGLK

SEQ ID NO: 10163 - protein, 6 aa, ARTIFICIAL SEQUENCE
  Synthetic Construct
EKGGNK

SEQ ID NO: 10164 - protein, 6 aa, ARTIFICIAL SEQUENCE
  Synthetic Construct
EKGGQK

SEQ ID NO: 10165 - protein, 6 aa, ARTIFICIAL SEQUENCE
  Synthetic Construct
EKGGRK

SEQ ID NO: 10166 - protein, 6 aa, ARTIFICIAL SEQUENCE
  Synthetic Construct
EKGGSK

SEQ ID NO: 10167 - protein, 6 aa, ARTIFICIAL SEQUENCE
  Synthetic Construct
EKGGTK

SEQ ID NO: 10168 - protein, 6 aa, ARTIFICIAL SEQUENCE
  Synthetic Construct
EKGGYK

SEQ ID NO: 10169 - protein, 6 aa, ARTIFICIAL SEQUENCE
  Synthetic Construct
EKGHAK

SEQ ID NO: 10170 - protein, 6 aa, ARTIFICIAL SEQUENCE
  Synthetic Construct
EKGHDK

SEQ ID NO: 10171 - protein, 6 aa, ARTIFICIAL SEQUENCE
  Synthetic Construct
EKGHEK

SEQ ID NO: 10172 - protein, 6 aa, ARTIFICIAL SEQUENCE
  Synthetic Construct
EKGHFK

SEQ ID NO: 10173 - protein, 6 aa, ARTIFICIAL SEQUENCE
  Synthetic Construct
EKGHGK

SEQ ID NO: 10174 - protein, 6 aa, ARTIFICIAL SEQUENCE
  Synthetic Construct
EKGHHK

SEQ ID NO: 10175 - protein, 6 aa, ARTIFICIAL SEQUENCE
  Synthetic Construct
EKGHIK

SEQ ID NO: 10176 - protein, 6 aa, ARTIFICIAL SEQUENCE
  Synthetic Construct
EKGHLK

SEQ ID NO: 10177 - protein, 6 aa, ARTIFICIAL SEQUENCE
  Synthetic Construct
EKGHNK

SEQ ID NO: 10178 - protein, 6 aa, ARTIFICIAL SEQUENCE
  Synthetic Construct
EKGHQK

SEQ ID NO: 10179 - protein, 6 aa, ARTIFICIAL SEQUENCE
  Synthetic Construct
EKGHRK

SEQ ID NO: 10180 - protein, 6 aa, ARTIFICIAL SEQUENCE
  Synthetic Construct
EKGHSK

SEQ ID NO: 10181 - protein, 6 aa, ARTIFICIAL SEQUENCE
  Synthetic Construct
EKGHTK

SEQ ID NO: 10182 - protein, 6 aa, ARTIFICIAL SEQUENCE
  Synthetic Construct
EKGHYK

SEQ ID NO: 10183 - protein, 6 aa, ARTIFICIAL SEQUENCE
  Synthetic Construct
EKGIAK

SEQ ID NO: 10184 - protein, 6 aa, ARTIFICIAL SEQUENCE
  Synthetic Construct
EKGIDK

SEQ ID NO: 10185 - protein, 6 aa, ARTIFICIAL SEQUENCE
  Synthetic Construct
EKGIEK

SEQ ID NO: 10186 - protein, 6 aa, ARTIFICIAL SEQUENCE
  Synthetic Construct
EKGIFK

SEQ ID NO: 10187 - protein, 6 aa, ARTIFICIAL SEQUENCE
  Synthetic Construct
EKGIGK

SEQ ID NO: 10188 - protein, 6 aa, ARTIFICIAL SEQUENCE
  Synthetic Construct
EKGIHK

SEQ ID NO: 10189 - protein, 6 aa, ARTIFICIAL SEQUENCE
  Synthetic Construct
EKGIIK

SEQ ID NO: 10190 - protein, 6 aa, ARTIFICIAL SEQUENCE
  Synthetic Construct
EKGILK

SEQ ID NO: 10191 - protein, 6 aa, ARTIFICIAL SEQUENCE
  Synthetic Construct
EKGINK

SEQ ID NO: 10192 - protein, 6 aa, ARTIFICIAL SEQUENCE
  Synthetic Construct
EKGIQK

SEQ ID NO: 10193 - protein, 6 aa, ARTIFICIAL SEQUENCE
  Synthetic Construct
EKGIRK

SEQ ID NO: 10194 - protein, 6 aa, ARTIFICIAL SEQUENCE
  Synthetic Construct
EKGISK

SEQ ID NO: 10195 - protein, 6 aa, ARTIFICIAL SEQUENCE
  Synthetic Construct
EKGITK

SEQ ID NO: 10196 - protein, 6 aa, ARTIFICIAL SEQUENCE
  Synthetic Construct
EKGIYK

SEQ ID NO: 10197 - protein, 6 aa, ARTIFICIAL SEQUENCE
  Synthetic Construct
EKGLAK

SEQ ID NO: 10198 - protein, 6 aa, ARTIFICIAL SEQUENCE
  Synthetic Construct
EKGLDK

SEQ ID NO: 10199 - protein, 6 aa, ARTIFICIAL SEQUENCE
  Synthetic Construct
EKGLEK

SEQ ID NO: 10200 - protein, 6 aa, ARTIFICIAL SEQUENCE
  Synthetic Construct
EKGLFK

SEQ ID NO: 10201 - protein, 6 aa, ARTIFICIAL SEQUENCE
  Synthetic Construct
EKGLGK

SEQ ID NO: 10202 - protein, 6 aa, ARTIFICIAL SEQUENCE
  Synthetic Construct
EKGLHK

SEQ ID NO: 10203 - protein, 6 aa, ARTIFICIAL SEQUENCE
  Synthetic Construct
EKGLIK

SEQ ID NO: 10204 - protein, 6 aa, ARTIFICIAL SEQUENCE
  Synthetic Construct
EKGLLK

SEQ ID NO: 10205 - protein, 6 aa, ARTIFICIAL SEQUENCE
  Synthetic Construct
EKGLNK

SEQ ID NO: 10206 - protein, 6 aa, ARTIFICIAL SEQUENCE
  Synthetic Construct
EKGLQK

SEQ ID NO: 10207 - protein, 6 aa, ARTIFICIAL SEQUENCE
  Synthetic Construct
EKGLRK

SEQ ID NO: 10208 - protein, 6 aa, ARTIFICIAL SEQUENCE
  Synthetic Construct
EKGLSK

SEQ ID NO: 10209 - protein, 6 aa, ARTIFICIAL SEQUENCE
  Synthetic Construct
EKGLTK

SEQ ID NO: 10210 - protein, 6 aa, ARTIFICIAL SEQUENCE
  Synthetic Construct
EKGLYK

SEQ ID NO: 10211 - protein, 6 aa, ARTIFICIAL SEQUENCE
  Synthetic Construct
EKGNAK

SEQ ID NO: 10212 - protein, 6 aa, ARTIFICIAL SEQUENCE
  Synthetic Construct
EKGNDK

SEQ ID NO: 10213 - protein, 6 aa, ARTIFICIAL SEQUENCE
  Synthetic Construct
EKGNEK

SEQ ID NO: 10214 - protein, 6 aa, ARTIFICIAL SEQUENCE
  Synthetic Construct
EKGNFK

SEQ ID NO: 10215 - protein, 6 aa, ARTIFICIAL SEQUENCE
  Synthetic Construct
EKGNGK

SEQ ID NO: 10216 - protein, 6 aa, ARTIFICIAL SEQUENCE
  Synthetic Construct
EKGNHK

SEQ ID NO: 10217 - protein, 6 aa, ARTIFICIAL SEQUENCE
  Synthetic Construct
EKGNIK

SEQ ID NO: 10218 - protein, 6 aa, ARTIFICIAL SEQUENCE
  Synthetic Construct
EKGNLK

SEQ ID NO: 10219 - protein, 6 aa, ARTIFICIAL SEQUENCE
  Synthetic Construct
EKGNNK

SEQ ID NO: 10220 - protein, 6 aa, ARTIFICIAL SEQUENCE
  Synthetic Construct
EKGNQK

SEQ ID NO: 10221 - protein, 6 aa, ARTIFICIAL SEQUENCE
  Synthetic Construct
EKGNRK

SEQ ID NO: 10222 - protein, 6 aa, ARTIFICIAL SEQUENCE
  Synthetic Construct
EKGNSK

SEQ ID NO: 10223 - protein, 6 aa, ARTIFICIAL SEQUENCE
  Synthetic Construct
EKGNTK

SEQ ID NO: 10224 - protein, 6 aa, ARTIFICIAL SEQUENCE
  Synthetic Construct
EKGNYK

SEQ ID NO: 10225 - protein, 6 aa, ARTIFICIAL SEQUENCE
  Synthetic Construct
EKGQAK

SEQ ID NO: 10226 - protein, 6 aa, ARTIFICIAL SEQUENCE
  Synthetic Construct
EKGQDK

SEQ ID NO: 10227 - protein, 6 aa, ARTIFICIAL SEQUENCE
  Synthetic Construct
EKGQEK

SEQ ID NO: 10228 - protein, 6 aa, ARTIFICIAL SEQUENCE
  Synthetic Construct
EKGQFK

SEQ ID NO: 10229 - protein, 6 aa, ARTIFICIAL SEQUENCE
  Synthetic Construct
EKGQGK

SEQ ID NO: 10230 - protein, 6 aa, ARTIFICIAL SEQUENCE
  Synthetic Construct
EKGQHK

SEQ ID NO: 10231 - protein, 6 aa, ARTIFICIAL SEQUENCE
  Synthetic Construct
EKGQIK

SEQ ID NO: 10232 - protein, 6 aa, ARTIFICIAL SEQUENCE
  Synthetic Construct
EKGQLK

SEQ ID NO: 10233 - protein, 6 aa, ARTIFICIAL SEQUENCE
  Synthetic Construct
EKGQNK

SEQ ID NO: 10234 - protein, 6 aa, ARTIFICIAL SEQUENCE
  Synthetic Construct
EKGQQK

SEQ ID NO: 10235 - protein, 6 aa, ARTIFICIAL SEQUENCE
  Synthetic Construct
EKGQRK

SEQ ID NO: 10236 - protein, 6 aa, ARTIFICIAL SEQUENCE
  Synthetic Construct
EKGQSK

SEQ ID NO: 10237 - protein, 6 aa, ARTIFICIAL SEQUENCE
  Synthetic Construct
EKGQTK

SEQ ID NO: 10238 - protein, 6 aa, ARTIFICIAL SEQUENCE
  Synthetic Construct
EKGQYK

SEQ ID NO: 10239 - protein, 6 aa, ARTIFICIAL SEQUENCE
  Synthetic Construct
EKGRAK

SEQ ID NO: 10240 - protein, 6 aa, ARTIFICIAL SEQUENCE
  Synthetic Construct
EKGRDK

SEQ ID NO: 10241 - protein, 6 aa, ARTIFICIAL SEQUENCE
  Synthetic Construct
EKGREK

SEQ ID NO: 10242 - protein, 6 aa, ARTIFICIAL SEQUENCE
  Synthetic Construct
EKGRFK

SEQ ID NO: 10243 - protein, 6 aa, ARTIFICIAL SEQUENCE
  Synthetic Construct
EKGRGK

SEQ ID NO: 10244 - protein, 6 aa, ARTIFICIAL SEQUENCE
  Synthetic Construct
EKGRHK

SEQ ID NO: 10245 - protein, 6 aa, ARTIFICIAL SEQUENCE
  Synthetic Construct
EKGRIK

SEQ ID NO: 10246 - protein, 6 aa, ARTIFICIAL SEQUENCE
  Synthetic Construct
EKGRLK

SEQ ID NO: 10247 - protein, 6 aa, ARTIFICIAL SEQUENCE
  Synthetic Construct
EKGRNK

SEQ ID NO: 10248 - protein, 6 aa, ARTIFICIAL SEQUENCE
  Synthetic Construct
EKGRQK

SEQ ID NO: 10249 - protein, 6 aa, ARTIFICIAL SEQUENCE
  Synthetic Construct
EKGRRK

SEQ ID NO: 10250 - protein, 6 aa, ARTIFICIAL SEQUENCE
  Synthetic Construct
EKGRSK

SEQ ID NO: 10251 - protein, 6 aa, ARTIFICIAL SEQUENCE
  Synthetic Construct
EKGRTK

SEQ ID NO: 10252 - protein, 6 aa, ARTIFICIAL SEQUENCE
  Synthetic Construct
EKGRYK

SEQ ID NO: 10253 - protein, 6 aa, ARTIFICIAL SEQUENCE
  Synthetic Construct
EKGSAK

SEQ ID NO: 10254 - protein, 6 aa, ARTIFICIAL SEQUENCE
  Synthetic Construct
EKGSDK

SEQ ID NO: 10255 - protein, 6 aa, ARTIFICIAL SEQUENCE
  Synthetic Construct
EKGSEK

SEQ ID NO: 10256 - protein, 6 aa, ARTIFICIAL SEQUENCE
  Synthetic Construct
EKGSFK

SEQ ID NO: 10257 - protein, 6 aa, ARTIFICIAL SEQUENCE
  Synthetic Construct
EKGSGK

SEQ ID NO: 10258 - protein, 6 aa, ARTIFICIAL SEQUENCE
  Synthetic Construct
EKGSHK

SEQ ID NO: 10259 - protein, 6 aa, ARTIFICIAL SEQUENCE
  Synthetic Construct
EKGSIK

SEQ ID NO: 10260 - protein, 6 aa, ARTIFICIAL SEQUENCE
  Synthetic Construct
EKGSLK

SEQ ID NO: 10261 - protein, 6 aa, ARTIFICIAL SEQUENCE
  Synthetic Construct
EKGSNK

SEQ ID NO: 10262 - protein, 6 aa, ARTIFICIAL SEQUENCE
  Synthetic Construct
EKGSQK

SEQ ID NO: 10263 - protein, 6 aa, ARTIFICIAL SEQUENCE
  Synthetic Construct
EKGSRK

SEQ ID NO: 10264 - protein, 6 aa, ARTIFICIAL SEQUENCE
  Synthetic Construct
EKGSSK

SEQ ID NO: 10265 - protein, 6 aa, ARTIFICIAL SEQUENCE
  Synthetic Construct
EKGSTK

SEQ ID NO: 10266 - protein, 6 aa, ARTIFICIAL SEQUENCE
  Synthetic Construct
EKGSYK

SEQ ID NO: 10267 - protein, 6 aa, ARTIFICIAL SEQUENCE
  Synthetic Construct
EKGTAK

SEQ ID NO: 10268 - protein, 6 aa, ARTIFICIAL SEQUENCE
  Synthetic Construct
EKGTDK

SEQ ID NO: 10269 - protein, 6 aa, ARTIFICIAL SEQUENCE
  Synthetic Construct
EKGTEK

SEQ ID NO: 10270 - protein, 6 aa, ARTIFICIAL SEQUENCE
  Synthetic Construct
EKGTFK

SEQ ID NO: 10271 - protein, 6 aa, ARTIFICIAL SEQUENCE
  Synthetic Construct
EKGTGK

SEQ ID NO: 10272 - protein, 6 aa, ARTIFICIAL SEQUENCE
  Synthetic Construct
EKGTHK

SEQ ID NO: 10273 - protein, 6 aa, ARTIFICIAL SEQUENCE
  Synthetic Construct
EKGTIK

SEQ ID NO: 10274 - protein, 6 aa, ARTIFICIAL SEQUENCE
  Synthetic Construct
EKGTLK

SEQ ID NO: 10275 - protein, 6 aa, ARTIFICIAL SEQUENCE
  Synthetic Construct
EKGTNK

SEQ ID NO: 10276 - protein, 6 aa, ARTIFICIAL SEQUENCE
  Synthetic Construct
EKGTQK

SEQ ID NO: 10277 - protein, 6 aa, ARTIFICIAL SEQUENCE
  Synthetic Construct
EKGTRK

SEQ ID NO: 10278 - protein, 6 aa, ARTIFICIAL SEQUENCE
  Synthetic Construct
EKGTSK

SEQ ID NO: 10279 - protein, 6 aa, ARTIFICIAL SEQUENCE
  Synthetic Construct
EKGTTK

SEQ ID NO: 10280 - protein, 6 aa, ARTIFICIAL SEQUENCE
  Synthetic Construct
EKGTYK

SEQ ID NO: 10281 - protein, 6 aa, ARTIFICIAL SEQUENCE
  Synthetic Construct
EKGYAK

SEQ ID NO: 10282 - protein, 6 aa, ARTIFICIAL SEQUENCE
  Synthetic Construct
EKGYDK

SEQ ID NO: 10283 - protein, 6 aa, ARTIFICIAL SEQUENCE
  Synthetic Construct
EKGYEK

SEQ ID NO: 10284 - protein, 6 aa, ARTIFICIAL SEQUENCE
  Synthetic Construct
EKGYFK

SEQ ID NO: 10285 - protein, 6 aa, ARTIFICIAL SEQUENCE
  Synthetic Construct
EKGYGK

SEQ ID NO: 10286 - protein, 6 aa, ARTIFICIAL SEQUENCE
  Synthetic Construct
EKGYHK

SEQ ID NO: 10287 - protein, 6 aa, ARTIFICIAL SEQUENCE
  Synthetic Construct
EKGYIK

SEQ ID NO: 10288 - protein, 6 aa, ARTIFICIAL SEQUENCE
  Synthetic Construct
EKGYLK

SEQ ID NO: 10289 - protein, 6 aa, ARTIFICIAL SEQUENCE
  Synthetic Construct
EKGYNK

SEQ ID NO: 10290 - protein, 6 aa, ARTIFICIAL SEQUENCE
  Synthetic Construct
EKGYQK

SEQ ID NO: 10291 - protein, 6 aa, ARTIFICIAL SEQUENCE
  Synthetic Construct
EKGYRK

SEQ ID NO: 10292 - protein, 6 aa, ARTIFICIAL SEQUENCE
  Synthetic Construct
EKGYSK

SEQ ID NO: 10293 - protein, 6 aa, ARTIFICIAL SEQUENCE
  Synthetic Construct
EKGYTK

SEQ ID NO: 10294 - protein, 6 aa, ARTIFICIAL SEQUENCE
  Synthetic Construct
EKGYYK

SEQ ID NO: 10295 - protein, 6 aa, ARTIFICIAL SEQUENCE
  Synthetic Construct
EKHAAK

SEQ ID NO: 10296 - protein, 6 aa, ARTIFICIAL SEQUENCE
  Synthetic Construct
EKHADK

SEQ ID NO: 10297 - protein, 6 aa, ARTIFICIAL SEQUENCE
  Synthetic Construct
EKHAEK

SEQ ID NO: 10298 - protein, 6 aa, ARTIFICIAL SEQUENCE
  Synthetic Construct
EKHAFK

SEQ ID NO: 10299 - protein, 6 aa, ARTIFICIAL SEQUENCE
  Synthetic Construct
EKHAGK

SEQ ID NO: 10300 - protein, 6 aa, ARTIFICIAL SEQUENCE
  Synthetic Construct
EKHAHK

SEQ ID NO: 10301 - protein, 6 aa, ARTIFICIAL SEQUENCE
  Synthetic Construct
EKHAIK

SEQ ID NO: 10302 - protein, 6 aa, ARTIFICIAL SEQUENCE
  Synthetic Construct
EKHALK

SEQ ID NO: 10303 - protein, 6 aa, ARTIFICIAL SEQUENCE
  Synthetic Construct
EKHANK

SEQ ID NO: 10304 - protein, 6 aa, ARTIFICIAL SEQUENCE
  Synthetic Construct
EKHAQK

SEQ ID NO: 10305 - protein, 6 aa, ARTIFICIAL SEQUENCE
  Synthetic Construct
EKHARK

SEQ ID NO: 10306 - protein, 6 aa, ARTIFICIAL SEQUENCE
  Synthetic Construct
EKHASK

SEQ ID NO: 10307 - protein, 6 aa, ARTIFICIAL SEQUENCE
  Synthetic Construct
EKHATK

SEQ ID NO: 10308 - protein, 6 aa, ARTIFICIAL SEQUENCE
  Synthetic Construct
EKHAYK

SEQ ID NO: 10309 - protein, 6 aa, ARTIFICIAL SEQUENCE
  Synthetic Construct
EKHDAK

SEQ ID NO: 10310 - protein, 6 aa, ARTIFICIAL SEQUENCE
  Synthetic Construct
EKHDDK

SEQ ID NO: 10311 - protein, 6 aa, ARTIFICIAL SEQUENCE
  Synthetic Construct
EKHDEK

SEQ ID NO: 10312 - protein, 6 aa, ARTIFICIAL SEQUENCE
  Synthetic Construct
EKHDFK

SEQ ID NO: 10313 - protein, 6 aa, ARTIFICIAL SEQUENCE
  Synthetic Construct
EKHDGK

SEQ ID NO: 10314 - protein, 6 aa, ARTIFICIAL SEQUENCE
  Synthetic Construct
EKHDHK

SEQ ID NO: 10315 - protein, 6 aa, ARTIFICIAL SEQUENCE
  Synthetic Construct
EKHDIK

SEQ ID NO: 10316 - protein, 6 aa, ARTIFICIAL SEQUENCE
  Synthetic Construct
EKHDLK

SEQ ID NO: 10317 - protein, 6 aa, ARTIFICIAL SEQUENCE
  Synthetic Construct
EKHDNK

SEQ ID NO: 10318 - protein, 6 aa, ARTIFICIAL SEQUENCE
  Synthetic Construct
EKHDQK

SEQ ID NO: 10319 - protein, 6 aa, ARTIFICIAL SEQUENCE
  Synthetic Construct
EKHDRK

SEQ ID NO: 10320 - protein, 6 aa, ARTIFICIAL SEQUENCE
  Synthetic Construct
EKHDSK

SEQ ID NO: 10321 - protein, 6 aa, ARTIFICIAL SEQUENCE
  Synthetic Construct
EKHDTK

SEQ ID NO: 10322 - protein, 6 aa, ARTIFICIAL SEQUENCE
  Synthetic Construct
EKHDYK

SEQ ID NO: 10323 - protein, 6 aa, ARTIFICIAL SEQUENCE
  Synthetic Construct
EKHEAK

SEQ ID NO: 10324 - protein, 6 aa, ARTIFICIAL SEQUENCE
  Synthetic Construct
EKHEDK

SEQ ID NO: 10325 - protein, 6 aa, ARTIFICIAL SEQUENCE
  Synthetic Construct
EKHEEK

SEQ ID NO: 10326 - protein, 6 aa, ARTIFICIAL SEQUENCE
  Synthetic Construct
EKHEFK

SEQ ID NO: 10327 - protein, 6 aa, ARTIFICIAL SEQUENCE
  Synthetic Construct
EKHEGK

SEQ ID NO: 10328 - protein, 6 aa, ARTIFICIAL SEQUENCE
  Synthetic Construct
EKHEHK

SEQ ID NO: 10329 - protein, 6 aa, ARTIFICIAL SEQUENCE
  Synthetic Construct
EKHEIK

SEQ ID NO: 10330 - protein, 6 aa, ARTIFICIAL SEQUENCE
  Synthetic Construct
EKHELK

SEQ ID NO: 10331 - protein, 6 aa, ARTIFICIAL SEQUENCE
  Synthetic Construct
EKHENK

SEQ ID NO: 10332 - protein, 6 aa, ARTIFICIAL SEQUENCE
  Synthetic Construct
EKHEQK

SEQ ID NO: 10333 - protein, 6 aa, ARTIFICIAL SEQUENCE
  Synthetic Construct
EKHERK

SEQ ID NO: 10334 - protein, 6 aa, ARTIFICIAL SEQUENCE
  Synthetic Construct
EKHESK

SEQ ID NO: 10335 - protein, 6 aa, ARTIFICIAL SEQUENCE
  Synthetic Construct
EKHETK

SEQ ID NO: 10336 - protein, 6 aa, ARTIFICIAL SEQUENCE
  Synthetic Construct
EKHEYK

SEQ ID NO: 10337 - protein, 6 aa, ARTIFICIAL SEQUENCE
  Synthetic Construct
EKHFAK

SEQ ID NO: 10338 - protein, 6 aa, ARTIFICIAL SEQUENCE
  Synthetic Construct
EKHFDK

SEQ ID NO: 10339 - protein, 6 aa, ARTIFICIAL SEQUENCE
  Synthetic Construct
EKHFEK

SEQ ID NO: 10340 - protein, 6 aa, ARTIFICIAL SEQUENCE
  Synthetic Construct
EKHFFK

SEQ ID NO: 10341 - protein, 6 aa, ARTIFICIAL SEQUENCE
  Synthetic Construct
EKHFGK

SEQ ID NO: 10342 - protein, 6 aa, ARTIFICIAL SEQUENCE
  Synthetic Construct
EKHFHK

SEQ ID NO: 10343 - protein, 6 aa, ARTIFICIAL SEQUENCE
  Synthetic Construct
EKHFIK

SEQ ID NO: 10344 - protein, 6 aa, ARTIFICIAL SEQUENCE
  Synthetic Construct
EKHFLK

SEQ ID NO: 10345 - protein, 6 aa, ARTIFICIAL SEQUENCE
  Synthetic Construct
EKHFNK

SEQ ID NO: 10346 - protein, 6 aa, ARTIFICIAL SEQUENCE
  Synthetic Construct
EKHFQK

SEQ ID NO: 10347 - protein, 6 aa, ARTIFICIAL SEQUENCE
  Synthetic Construct
EKHFRK

SEQ ID NO: 10348 - protein, 6 aa, ARTIFICIAL SEQUENCE
  Synthetic Construct
EKHFSK

SEQ ID NO: 10349 - protein, 6 aa, ARTIFICIAL SEQUENCE
  Synthetic Construct
EKHFTK

SEQ ID NO: 10350 - protein, 6 aa, ARTIFICIAL SEQUENCE
  Synthetic Construct
EKHFYK

SEQ ID NO: 10351 - protein, 6 aa, ARTIFICIAL SEQUENCE
  Synthetic Construct
EKHGAK

SEQ ID NO: 10352 - protein, 6 aa, ARTIFICIAL SEQUENCE
  Synthetic Construct
EKHGDK

SEQ ID NO: 10353 - protein, 6 aa, ARTIFICIAL SEQUENCE
  Synthetic Construct
EKHGEK

SEQ ID NO: 10354 - protein, 6 aa, ARTIFICIAL SEQUENCE
  Synthetic Construct
EKHGFK

SEQ ID NO: 10355 - protein, 6 aa, ARTIFICIAL SEQUENCE
  Synthetic Construct
EKHGGK

SEQ ID NO: 10356 - protein, 6 aa, ARTIFICIAL SEQUENCE
  Synthetic Construct
EKHGHK

SEQ ID NO: 10357 - protein, 6 aa, ARTIFICIAL SEQUENCE
  Synthetic Construct
EKHGIK

SEQ ID NO: 10358 - protein, 6 aa, ARTIFICIAL SEQUENCE
  Synthetic Construct
EKHGLK

SEQ ID NO: 10359 - protein, 6 aa, ARTIFICIAL SEQUENCE
  Synthetic Construct
EKHGNK

SEQ ID NO: 10360 - protein, 6 aa, ARTIFICIAL SEQUENCE
  Synthetic Construct
EKHGQK

SEQ ID NO: 10361 - protein, 6 aa, ARTIFICIAL SEQUENCE
  Synthetic Construct
EKHGRK

SEQ ID NO: 10362 - protein, 6 aa, ARTIFICIAL SEQUENCE
  Synthetic Construct
EKHGSK

SEQ ID NO: 10363 - protein, 6 aa, ARTIFICIAL SEQUENCE
  Synthetic Construct
EKHGTK

SEQ ID NO: 10364 - protein, 6 aa, ARTIFICIAL SEQUENCE
  Synthetic Construct
EKHGYK

SEQ ID NO: 10365 - protein, 6 aa, ARTIFICIAL SEQUENCE
  Synthetic Construct
EKHHAK

SEQ ID NO: 10366 - protein, 6 aa, ARTIFICIAL SEQUENCE
  Synthetic Construct
EKHHDK

SEQ ID NO: 10367 - protein, 6 aa, ARTIFICIAL SEQUENCE
  Synthetic Construct
EKHHEK

SEQ ID NO: 10368 - protein, 6 aa, ARTIFICIAL SEQUENCE
  Synthetic Construct
EKHHFK

SEQ ID NO: 10369 - protein, 6 aa, ARTIFICIAL SEQUENCE
  Synthetic Construct
EKHHGK

SEQ ID NO: 10370 - protein, 6 aa, ARTIFICIAL SEQUENCE
  Synthetic Construct
EKHHHK

SEQ ID NO: 10371 - protein, 6 aa, ARTIFICIAL SEQUENCE
  Synthetic Construct
EKHHIK

SEQ ID NO: 10372 - protein, 6 aa, ARTIFICIAL SEQUENCE
  Synthetic Construct
EKHHLK

SEQ ID NO: 10373 - protein, 6 aa, ARTIFICIAL SEQUENCE
  Synthetic Construct
EKHHNK

SEQ ID NO: 10374 - protein, 6 aa, ARTIFICIAL SEQUENCE
  Synthetic Construct
EKHHQK

SEQ ID NO: 10375 - protein, 6 aa, ARTIFICIAL SEQUENCE
  Synthetic Construct
EKHHRK

SEQ ID NO: 10376 - protein, 6 aa, ARTIFICIAL SEQUENCE
  Synthetic Construct
EKHHSK

SEQ ID NO: 10377 - protein, 6 aa, ARTIFICIAL SEQUENCE
  Synthetic Construct
EKHHTK

SEQ ID NO: 10378 - protein, 6 aa, ARTIFICIAL SEQUENCE
  Synthetic Construct
EKHHYK

SEQ ID NO: 10379 - protein, 6 aa, ARTIFICIAL SEQUENCE
  Synthetic Construct
EKHIAK

SEQ ID NO: 10380 - protein, 6 aa, ARTIFICIAL SEQUENCE
  Synthetic Construct
EKHIDK

SEQ ID NO: 10381 - protein, 6 aa, ARTIFICIAL SEQUENCE
  Synthetic Construct
EKHIEK

SEQ ID NO: 10382 - protein, 6 aa, ARTIFICIAL SEQUENCE
  Synthetic Construct
EKHIFK

SEQ ID NO: 10383 - protein, 6 aa, ARTIFICIAL SEQUENCE
  Synthetic Construct
EKHIGK

SEQ ID NO: 10384 - protein, 6 aa, ARTIFICIAL SEQUENCE
  Synthetic Construct
EKHIHK

SEQ ID NO: 10385 - protein, 6 aa, ARTIFICIAL SEQUENCE
  Synthetic Construct
EKHIIK

SEQ ID NO: 10386 - protein, 6 aa, ARTIFICIAL SEQUENCE
  Synthetic Construct
EKHILK

SEQ ID NO: 10387 - protein, 6 aa, ARTIFICIAL SEQUENCE
  Synthetic Construct
EKHINK

SEQ ID NO: 10388 - protein, 6 aa, ARTIFICIAL SEQUENCE
  Synthetic Construct
EKHIQK

SEQ ID NO: 10389 - protein, 6 aa, ARTIFICIAL SEQUENCE
  Synthetic Construct
EKHIRK

SEQ ID NO: 10390 - protein, 6 aa, ARTIFICIAL SEQUENCE
  Synthetic Construct
EKHISK

SEQ ID NO: 10391 - protein, 6 aa, ARTIFICIAL SEQUENCE
  Synthetic Construct
EKHITK

SEQ ID NO: 10392 - protein, 6 aa, ARTIFICIAL SEQUENCE
  Synthetic Construct
EKHIYK

SEQ ID NO: 10393 - protein, 6 aa, ARTIFICIAL SEQUENCE
  Synthetic Construct
EKHLAK

SEQ ID NO: 10394 - protein, 6 aa, ARTIFICIAL SEQUENCE
  Synthetic Construct
EKHLDK

SEQ ID NO: 10395 - protein, 6 aa, ARTIFICIAL SEQUENCE
  Synthetic Construct
EKHLEK

SEQ ID NO: 10396 - protein, 6 aa, ARTIFICIAL SEQUENCE
  Synthetic Construct
EKHLFK

SEQ ID NO: 10397 - protein, 6 aa, ARTIFICIAL SEQUENCE
  Synthetic Construct
EKHLGK

SEQ ID NO: 10398 - protein, 6 aa, ARTIFICIAL SEQUENCE
  Synthetic Construct
EKHLHK

SEQ ID NO: 10399 - protein, 6 aa, ARTIFICIAL SEQUENCE
  Synthetic Construct
EKHLIK

SEQ ID NO: 10400 - protein, 6 aa, ARTIFICIAL SEQUENCE
  Synthetic Construct
EKHLLK

SEQ ID NO: 10401 - protein, 6 aa, ARTIFICIAL SEQUENCE
  Synthetic Construct
EKHLNK

SEQ ID NO: 10402 - protein, 6 aa, ARTIFICIAL SEQUENCE
  Synthetic Construct
EKHLQK

SEQ ID NO: 10403 - protein, 6 aa, ARTIFICIAL SEQUENCE
  Synthetic Construct
EKHLRK

SEQ ID NO: 10404 - protein, 6 aa, ARTIFICIAL SEQUENCE
  Synthetic Construct
EKHLSK

SEQ ID NO: 10405 - protein, 6 aa, ARTIFICIAL SEQUENCE
  Synthetic Construct
EKHLTK

SEQ ID NO: 10406 - protein, 6 aa, ARTIFICIAL SEQUENCE
  Synthetic Construct
EKHLYK

SEQ ID NO: 10407 - protein, 6 aa, ARTIFICIAL SEQUENCE
  Synthetic Construct
EKHNAK

SEQ ID NO: 10408 - protein, 6 aa, ARTIFICIAL SEQUENCE
  Synthetic Construct
EKHNDK

SEQ ID NO: 10409 - protein, 6 aa, ARTIFICIAL SEQUENCE
  Synthetic Construct
EKHNEK

SEQ ID NO: 10410 - protein, 6 aa, ARTIFICIAL SEQUENCE
  Synthetic Construct
EKHNFK

SEQ ID NO: 10411 - protein, 6 aa, ARTIFICIAL SEQUENCE
  Synthetic Construct
EKHNGK

SEQ ID NO: 10412 - protein, 6 aa, ARTIFICIAL SEQUENCE
  Synthetic Construct
EKHNHK

SEQ ID NO: 10413 - protein, 6 aa, ARTIFICIAL SEQUENCE
  Synthetic Construct
EKHNIK

SEQ ID NO: 10414 - protein, 6 aa, ARTIFICIAL SEQUENCE
  Synthetic Construct
EKHNLK

SEQ ID NO: 10415 - protein, 6 aa, ARTIFICIAL SEQUENCE
  Synthetic Construct
EKHNNK

SEQ ID NO: 10416 - protein, 6 aa, ARTIFICIAL SEQUENCE
  Synthetic Construct
EKHNQK

SEQ ID NO: 10417 - protein, 6 aa, ARTIFICIAL SEQUENCE
  Synthetic Construct
EKHNRK

SEQ ID NO: 10418 - protein, 6 aa, ARTIFICIAL SEQUENCE
  Synthetic Construct
EKHNSK

SEQ ID NO: 10419 - protein, 6 aa, ARTIFICIAL SEQUENCE
  Synthetic Construct
EKHNTK

SEQ ID NO: 10420 - protein, 6 aa, ARTIFICIAL SEQUENCE
  Synthetic Construct
EKHNYK

SEQ ID NO: 10421 - protein, 6 aa, ARTIFICIAL SEQUENCE
  Synthetic Construct
EKHQAK

SEQ ID NO: 10422 - protein, 6 aa, ARTIFICIAL SEQUENCE
  Synthetic Construct
EKHQDK

SEQ ID NO: 10423 - protein, 6 aa, ARTIFICIAL SEQUENCE
  Synthetic Construct
EKHQEK

SEQ ID NO: 10424 - protein, 6 aa, ARTIFICIAL SEQUENCE
  Synthetic Construct
EKHQFK

SEQ ID NO: 10425 - protein, 6 aa, ARTIFICIAL SEQUENCE
  Synthetic Construct
EKHQGK

SEQ ID NO: 10426 - protein, 6 aa, ARTIFICIAL SEQUENCE
  Synthetic Construct
EKHQHK

SEQ ID NO: 10427 - protein, 6 aa, ARTIFICIAL SEQUENCE
  Synthetic Construct
EKHQIK

SEQ ID NO: 10428 - protein, 6 aa, ARTIFICIAL SEQUENCE
  Synthetic Construct
EKHQLK

SEQ ID NO: 10429 - protein, 6 aa, ARTIFICIAL SEQUENCE
  Synthetic Construct
EKHQNK

SEQ ID NO: 10430 - protein, 6 aa, ARTIFICIAL SEQUENCE
  Synthetic Construct
EKHQQK

SEQ ID NO: 10431 - protein, 6 aa, ARTIFICIAL SEQUENCE
  Synthetic Construct
EKHQRK

SEQ ID NO: 10432 - protein, 6 aa, ARTIFICIAL SEQUENCE
  Synthetic Construct
EKHQSK

SEQ ID NO: 10433 - protein, 6 aa, ARTIFICIAL SEQUENCE
  Synthetic Construct
EKHQTK

SEQ ID NO: 10434 - protein, 6 aa, ARTIFICIAL SEQUENCE
  Synthetic Construct
EKHQYK

SEQ ID NO: 10435 - protein, 6 aa, ARTIFICIAL SEQUENCE
  Synthetic Construct
EKHRAK

SEQ ID NO: 10436 - protein, 6 aa, ARTIFICIAL SEQUENCE
  Synthetic Construct
EKHRDK

SEQ ID NO: 10437 - protein, 6 aa, ARTIFICIAL SEQUENCE
  Synthetic Construct
EKHREK

SEQ ID NO: 10438 - protein, 6 aa, ARTIFICIAL SEQUENCE
  Synthetic Construct
EKHRFK

SEQ ID NO: 10439 - protein, 6 aa, ARTIFICIAL SEQUENCE
  Synthetic Construct
EKHRGK

SEQ ID NO: 10440 - protein, 6 aa, ARTIFICIAL SEQUENCE
  Synthetic Construct
EKHRHK

SEQ ID NO: 10441 - protein, 6 aa, ARTIFICIAL SEQUENCE
  Synthetic Construct
EKHRIK

SEQ ID NO: 10442 - protein, 6 aa, ARTIFICIAL SEQUENCE
  Synthetic Construct
EKHRLK

SEQ ID NO: 10443 - protein, 6 aa, ARTIFICIAL SEQUENCE
  Synthetic Construct
EKHRNK

SEQ ID NO: 10444 - protein, 6 aa, ARTIFICIAL SEQUENCE
  Synthetic Construct
EKHRQK

SEQ ID NO: 10445 - protein, 6 aa, ARTIFICIAL SEQUENCE
  Synthetic Construct
EKHRRK

SEQ ID NO: 10446 - protein, 6 aa, ARTIFICIAL SEQUENCE
  Synthetic Construct
EKHRSK

SEQ ID NO: 10447 - protein, 6 aa, ARTIFICIAL SEQUENCE
  Synthetic Construct
EKHRTK

SEQ ID NO: 10448 - protein, 6 aa, ARTIFICIAL SEQUENCE
  Synthetic Construct
EKHRYK

SEQ ID NO: 10449 - protein, 6 aa, ARTIFICIAL SEQUENCE
  Synthetic Construct
EKHSAK

SEQ ID NO: 10450 - protein, 6 aa, ARTIFICIAL SEQUENCE
  Synthetic Construct
EKHSDK

SEQ ID NO: 10451 - protein, 6 aa, ARTIFICIAL SEQUENCE
  Synthetic Construct
EKHSEK

SEQ ID NO: 10452 - protein, 6 aa, ARTIFICIAL SEQUENCE
  Synthetic Construct
EKHSFK

SEQ ID NO: 10453 - protein, 6 aa, ARTIFICIAL SEQUENCE
  Synthetic Construct
EKHSGK

SEQ ID NO: 10454 - protein, 6 aa, ARTIFICIAL SEQUENCE
  Synthetic Construct
EKHSHK

SEQ ID NO: 10455 - protein, 6 aa, ARTIFICIAL SEQUENCE
  Synthetic Construct
EKHSIK

SEQ ID NO: 10456 - protein, 6 aa, ARTIFICIAL SEQUENCE
  Synthetic Construct
EKHSLK

SEQ ID NO: 10457 - protein, 6 aa, ARTIFICIAL SEQUENCE
  Synthetic Construct
EKHSNK

SEQ ID NO: 10458 - protein, 6 aa, ARTIFICIAL SEQUENCE
  Synthetic Construct
EKHSQK

SEQ ID NO: 10459 - protein, 6 aa, ARTIFICIAL SEQUENCE
  Synthetic Construct
EKHSRK

SEQ ID NO: 10460 - protein, 6 aa, ARTIFICIAL SEQUENCE
  Synthetic Construct
EKHSSK

SEQ ID NO: 10461 - protein, 6 aa, ARTIFICIAL SEQUENCE
  Synthetic Construct
EKHSTK

SEQ ID NO: 10462 - protein, 6 aa, ARTIFICIAL SEQUENCE
  Synthetic Construct
EKHSYK

SEQ ID NO: 10463 - protein, 6 aa, ARTIFICIAL SEQUENCE
  Synthetic Construct
EKHTAK

SEQ ID NO: 10464 - protein, 6 aa, ARTIFICIAL SEQUENCE
  Synthetic Construct
EKHTDK

SEQ ID NO: 10465 - protein, 6 aa, ARTIFICIAL SEQUENCE
  Synthetic Construct
EKHTEK

SEQ ID NO: 10466 - protein, 6 aa, ARTIFICIAL SEQUENCE
  Synthetic Construct
EKHTFK

SEQ ID NO: 10467 - protein, 6 aa, ARTIFICIAL SEQUENCE
  Synthetic Construct
EKHTGK

SEQ ID NO: 10468 - protein, 6 aa, ARTIFICIAL SEQUENCE
  Synthetic Construct
EKHTHK

SEQ ID NO: 10469 - protein, 6 aa, ARTIFICIAL SEQUENCE
  Synthetic Construct
EKHTIK

SEQ ID NO: 10470 - protein, 6 aa, ARTIFICIAL SEQUENCE
  Synthetic Construct
EKHTLK

SEQ ID NO: 10471 - protein, 6 aa, ARTIFICIAL SEQUENCE
  Synthetic Construct
EKHTNK

SEQ ID NO: 10472 - protein, 6 aa, ARTIFICIAL SEQUENCE
  Synthetic Construct
EKHTQK

SEQ ID NO: 10473 - protein, 6 aa, ARTIFICIAL SEQUENCE
  Synthetic Construct
EKHTRK

SEQ ID NO: 10474 - protein, 6 aa, ARTIFICIAL SEQUENCE
  Synthetic Construct
EKHTSK

SEQ ID NO: 10475 - protein, 6 aa, ARTIFICIAL SEQUENCE
  Synthetic Construct
EKHTTK

SEQ ID NO: 10476 - protein, 6 aa, ARTIFICIAL SEQUENCE
  Synthetic Construct
EKHTYK

SEQ ID NO: 10477 - protein, 6 aa, ARTIFICIAL SEQUENCE
  Synthetic Construct
EKHYAK

SEQ ID NO: 10478 - protein, 6 aa, ARTIFICIAL SEQUENCE
  Synthetic Construct
EKHYDK

SEQ ID NO: 10479 - protein, 6 aa, ARTIFICIAL SEQUENCE
  Synthetic Construct
EKHYEK

SEQ ID NO: 10480 - protein, 6 aa, ARTIFICIAL SEQUENCE
  Synthetic Construct
EKHYFK

SEQ ID NO: 10481 - protein, 6 aa, ARTIFICIAL SEQUENCE
  Synthetic Construct
EKHYGK

SEQ ID NO: 10482 - protein, 6 aa, ARTIFICIAL SEQUENCE
  Synthetic Construct
EKHYHK

SEQ ID NO: 10483 - protein, 6 aa, ARTIFICIAL SEQUENCE
  Synthetic Construct
EKHYIK

SEQ ID NO: 10484 - protein, 6 aa, ARTIFICIAL SEQUENCE
  Synthetic Construct
EKHYLK

SEQ ID NO: 10485 - protein, 6 aa, ARTIFICIAL SEQUENCE
  Synthetic Construct
EKHYNK

SEQ ID NO: 10486 - protein, 6 aa, ARTIFICIAL SEQUENCE
  Synthetic Construct
EKHYQK

SEQ ID NO: 10487 - protein, 6 aa, ARTIFICIAL SEQUENCE
  Synthetic Construct
EKHYRK

SEQ ID NO: 10488 - protein, 6 aa, ARTIFICIAL SEQUENCE
  Synthetic Construct
EKHYSK

SEQ ID NO: 10489 - protein, 6 aa, ARTIFICIAL SEQUENCE
  Synthetic Construct
EKHYTK

SEQ ID NO: 10490 - protein, 6 aa, ARTIFICIAL SEQUENCE
  Synthetic Construct
EKHYYK

SEQ ID NO: 10491 - protein, 6 aa, ARTIFICIAL SEQUENCE
  Synthetic Construct
EKIAAK

SEQ ID NO: 10492 - protein, 6 aa, ARTIFICIAL SEQUENCE
  Synthetic Construct
EKIADK

SEQ ID NO: 10493 - protein, 6 aa, ARTIFICIAL SEQUENCE
  Synthetic Construct
EKIAEK

SEQ ID NO: 10494 - protein, 6 aa, ARTIFICIAL SEQUENCE
  Synthetic Construct
EKIAFK

SEQ ID NO: 10495 - protein, 6 aa, ARTIFICIAL SEQUENCE
  Synthetic Construct
EKIAGK

SEQ ID NO: 10496 - protein, 6 aa, ARTIFICIAL SEQUENCE
  Synthetic Construct
EKIAHK

SEQ ID NO: 10497 - protein, 6 aa, ARTIFICIAL SEQUENCE
  Synthetic Construct
EKIAIK

SEQ ID NO: 10498 - protein, 6 aa, ARTIFICIAL SEQUENCE
  Synthetic Construct
EKIALK

SEQ ID NO: 10499 - protein, 6 aa, ARTIFICIAL SEQUENCE
  Synthetic Construct
EKIANK

SEQ ID NO: 10500 - protein, 6 aa, ARTIFICIAL SEQUENCE
  Synthetic Construct
EKIAQK

SEQ ID NO: 10501 - protein, 6 aa, ARTIFICIAL SEQUENCE
  Synthetic Construct
EKIARK

SEQ ID NO: 10502 - protein, 6 aa, ARTIFICIAL SEQUENCE
  Synthetic Construct
EKIASK

SEQ ID NO: 10503 - protein, 6 aa, ARTIFICIAL SEQUENCE
  Synthetic Construct
EKIATK

SEQ ID NO: 10504 - protein, 6 aa, ARTIFICIAL SEQUENCE
  Synthetic Construct
EKIAYK

SEQ ID NO: 10505 - protein, 6 aa, ARTIFICIAL SEQUENCE
  Synthetic Construct
EKIDAK

SEQ ID NO: 10506 - protein, 6 aa, ARTIFICIAL SEQUENCE
  Synthetic Construct
EKIDDK

SEQ ID NO: 10507 - protein, 6 aa, ARTIFICIAL SEQUENCE
  Synthetic Construct
EKIDEK

SEQ ID NO: 10508 - protein, 6 aa, ARTIFICIAL SEQUENCE
  Synthetic Construct
EKIDFK

SEQ ID NO: 10509 - protein, 6 aa, ARTIFICIAL SEQUENCE
  Synthetic Construct
EKIDGK

SEQ ID NO: 10510 - protein, 6 aa, ARTIFICIAL SEQUENCE
  Synthetic Construct
EKIDHK

SEQ ID NO: 10511 - protein, 6 aa, ARTIFICIAL SEQUENCE
  Synthetic Construct
EKIDIK

SEQ ID NO: 10512 - protein, 6 aa, ARTIFICIAL SEQUENCE
  Synthetic Construct
EKIDLK

SEQ ID NO: 10513 - protein, 6 aa, ARTIFICIAL SEQUENCE
  Synthetic Construct
EKIDNK

SEQ ID NO: 10514 - protein, 6 aa, ARTIFICIAL SEQUENCE
  Synthetic Construct
EKIDQK

SEQ ID NO: 10515 - protein, 6 aa, ARTIFICIAL SEQUENCE
  Synthetic Construct
EKIDRK

SEQ ID NO: 10516 - protein, 6 aa, ARTIFICIAL SEQUENCE
  Synthetic Construct
EKIDSK

SEQ ID NO: 10517 - protein, 6 aa, ARTIFICIAL SEQUENCE
  Synthetic Construct
EKIDTK

SEQ ID NO: 10518 - protein, 6 aa, ARTIFICIAL SEQUENCE
  Synthetic Construct
EKIDYK

SEQ ID NO: 10519 - protein, 6 aa, ARTIFICIAL SEQUENCE
  Synthetic Construct
EKIEAK

SEQ ID NO: 10520 - protein, 6 aa, ARTIFICIAL SEQUENCE
  Synthetic Construct
EKIEDK

SEQ ID NO: 10521 - protein, 6 aa, ARTIFICIAL SEQUENCE
  Synthetic Construct
EKIEEK

SEQ ID NO: 10522 - protein, 6 aa, ARTIFICIAL SEQUENCE
  Synthetic Construct
EKIEFK

SEQ ID NO: 10523 - protein, 6 aa, ARTIFICIAL SEQUENCE
  Synthetic Construct
EKIEGK

SEQ ID NO: 10524 - protein, 6 aa, ARTIFICIAL SEQUENCE
  Synthetic Construct
EKIEHK

SEQ ID NO: 10525 - protein, 6 aa, ARTIFICIAL SEQUENCE
  Synthetic Construct
EKIEIK

SEQ ID NO: 10526 - protein, 6 aa, ARTIFICIAL SEQUENCE
  Synthetic Construct
EKIELK

SEQ ID NO: 10527 - protein, 6 aa, ARTIFICIAL SEQUENCE
  Synthetic Construct
EKIENK

SEQ ID NO: 10528 - protein, 6 aa, ARTIFICIAL SEQUENCE
  Synthetic Construct
EKIEQK

SEQ ID NO: 10529 - protein, 6 aa, ARTIFICIAL SEQUENCE
  Synthetic Construct
EKIERK

SEQ ID NO: 10530 - protein, 6 aa, ARTIFICIAL SEQUENCE
  Synthetic Construct
EKIESK

SEQ ID NO: 10531 - protein, 6 aa, ARTIFICIAL SEQUENCE
  Synthetic Construct
EKIETK

SEQ ID NO: 10532 - protein, 6 aa, ARTIFICIAL SEQUENCE
  Synthetic Construct
EKIEYK

SEQ ID NO: 10533 - protein, 6 aa, ARTIFICIAL SEQUENCE
  Synthetic Construct
EKIFAK

SEQ ID NO: 10534 - protein, 6 aa, ARTIFICIAL SEQUENCE
  Synthetic Construct
EKIFDK

SEQ ID NO: 10535 - protein, 6 aa, ARTIFICIAL SEQUENCE
  Synthetic Construct
EKIFEK

SEQ ID NO: 10536 - protein, 6 aa, ARTIFICIAL SEQUENCE
  Synthetic Construct
EKIFFK

SEQ ID NO: 10537 - protein, 6 aa, ARTIFICIAL SEQUENCE
  Synthetic Construct
EKIFGK

SEQ ID NO: 10538 - protein, 6 aa, ARTIFICIAL SEQUENCE
  Synthetic Construct
EKIFHK

SEQ ID NO: 10539 - protein, 6 aa, ARTIFICIAL SEQUENCE
  Synthetic Construct
EKIFIK

SEQ ID NO: 10540 - protein, 6 aa, ARTIFICIAL SEQUENCE
  Synthetic Construct
EKIFLK

SEQ ID NO: 10541 - protein, 6 aa, ARTIFICIAL SEQUENCE
  Synthetic Construct
EKIFNK

SEQ ID NO: 10542 - protein, 6 aa, ARTIFICIAL SEQUENCE
  Synthetic Construct
EKIFQK

SEQ ID NO: 10543 - protein, 6 aa, ARTIFICIAL SEQUENCE
  Synthetic Construct
EKIFRK

SEQ ID NO: 10544 - protein, 6 aa, ARTIFICIAL SEQUENCE
  Synthetic Construct
EKIFSK

SEQ ID NO: 10545 - protein, 6 aa, ARTIFICIAL SEQUENCE
  Synthetic Construct
EKIFTK

SEQ ID NO: 10546 - protein, 6 aa, ARTIFICIAL SEQUENCE
  Synthetic Construct
EKIFYK

SEQ ID NO: 10547 - protein, 6 aa, ARTIFICIAL SEQUENCE
  Synthetic Construct
EKIGAK

SEQ ID NO: 10548 - protein, 6 aa, ARTIFICIAL SEQUENCE
  Synthetic Construct
EKIGDK

SEQ ID NO: 10549 - protein, 6 aa, ARTIFICIAL SEQUENCE
  Synthetic Construct
EKIGEK

SEQ ID NO: 10550 - protein, 6 aa, ARTIFICIAL SEQUENCE
  Synthetic Construct
EKIGFK

SEQ ID NO: 10551 - protein, 6 aa, ARTIFICIAL SEQUENCE
  Synthetic Construct
EKIGGK

SEQ ID NO: 10552 - protein, 6 aa, ARTIFICIAL SEQUENCE
  Synthetic Construct
EKIGHK

SEQ ID NO: 10553 - protein, 6 aa, ARTIFICIAL SEQUENCE
  Synthetic Construct
EKIGIK

SEQ ID NO: 10554 - protein, 6 aa, ARTIFICIAL SEQUENCE
  Synthetic Construct
EKIGLK

SEQ ID NO: 10555 - protein, 6 aa, ARTIFICIAL SEQUENCE
  Synthetic Construct
EKIGNK

SEQ ID NO: 10556 - protein, 6 aa, ARTIFICIAL SEQUENCE
  Synthetic Construct
EKIGQK

SEQ ID NO: 10557 - protein, 6 aa, ARTIFICIAL SEQUENCE
  Synthetic Construct
EKIGRK

SEQ ID NO: 10558 - protein, 6 aa, ARTIFICIAL SEQUENCE
  Synthetic Construct
EKIGSK

SEQ ID NO: 10559 - protein, 6 aa, ARTIFICIAL SEQUENCE
  Synthetic Construct
EKIGTK

SEQ ID NO: 10560 - protein, 6 aa, ARTIFICIAL SEQUENCE
  Synthetic Construct
EKIGYK

SEQ ID NO: 10561 - protein, 6 aa, ARTIFICIAL SEQUENCE
  Synthetic Construct
EKIHAK

SEQ ID NO: 10562 - protein, 6 aa, ARTIFICIAL SEQUENCE
  Synthetic Construct
EKIHDK

SEQ ID NO: 10563 - protein, 6 aa, ARTIFICIAL SEQUENCE
  Synthetic Construct
EKIHEK

SEQ ID NO: 10564 - protein, 6 aa, ARTIFICIAL SEQUENCE
  Synthetic Construct
EKIHFK

SEQ ID NO: 10565 - protein, 6 aa, ARTIFICIAL SEQUENCE
  Synthetic Construct
EKIHGK

SEQ ID NO: 10566 - protein, 6 aa, ARTIFICIAL SEQUENCE
  Synthetic Construct
EKIHHK

SEQ ID NO: 10567 - protein, 6 aa, ARTIFICIAL SEQUENCE
  Synthetic Construct
EKIHIK

SEQ ID NO: 10568 - protein, 6 aa, ARTIFICIAL SEQUENCE
  Synthetic Construct
EKIHLK

SEQ ID NO: 10569 - protein, 6 aa, ARTIFICIAL SEQUENCE
  Synthetic Construct
EKIHNK

SEQ ID NO: 10570 - protein, 6 aa, ARTIFICIAL SEQUENCE
  Synthetic Construct
EKIHQK

SEQ ID NO: 10571 - protein, 6 aa, ARTIFICIAL SEQUENCE
  Synthetic Construct
EKIHRK

SEQ ID NO: 10572 - protein, 6 aa, ARTIFICIAL SEQUENCE
  Synthetic Construct
EKIHSK

SEQ ID NO: 10573 - protein, 6 aa, ARTIFICIAL SEQUENCE
  Synthetic Construct
EKIHTK

SEQ ID NO: 10574 - protein, 6 aa, ARTIFICIAL SEQUENCE
  Synthetic Construct
EKIHYK

SEQ ID NO: 10575 - protein, 6 aa, ARTIFICIAL SEQUENCE
  Synthetic Construct
EKIIAK

SEQ ID NO: 10576 - protein, 6 aa, ARTIFICIAL SEQUENCE
  Synthetic Construct
EKIIDK

SEQ ID NO: 10577 - protein, 6 aa, ARTIFICIAL SEQUENCE
  Synthetic Construct
EKIIEK

SEQ ID NO: 10578 - protein, 6 aa, ARTIFICIAL SEQUENCE
  Synthetic Construct
EKIIFK

SEQ ID NO: 10579 - protein, 6 aa, ARTIFICIAL SEQUENCE
  Synthetic Construct
EKIIGK

SEQ ID NO: 10580 - protein, 6 aa, ARTIFICIAL SEQUENCE
  Synthetic Construct
EKIIHK

SEQ ID NO: 10581 - protein, 6 aa, ARTIFICIAL SEQUENCE
  Synthetic Construct
EKIIIK

SEQ ID NO: 10582 - protein, 6 aa, ARTIFICIAL SEQUENCE
  Synthetic Construct
EKIILK

SEQ ID NO: 10583 - protein, 6 aa, ARTIFICIAL SEQUENCE
  Synthetic Construct
EKIINK

SEQ ID NO: 10584 - protein, 6 aa, ARTIFICIAL SEQUENCE
  Synthetic Construct
EKIIQK

SEQ ID NO: 10585 - protein, 6 aa, ARTIFICIAL SEQUENCE
  Synthetic Construct
EKIIRK

SEQ ID NO: 10586 - protein, 6 aa, ARTIFICIAL SEQUENCE
  Synthetic Construct
EKIISK

SEQ ID NO: 10587 - protein, 6 aa, ARTIFICIAL SEQUENCE
  Synthetic Construct
EKIITK

SEQ ID NO: 10588 - protein, 6 aa, ARTIFICIAL SEQUENCE
  Synthetic Construct
EKIIYK

SEQ ID NO: 10589 - protein, 6 aa, ARTIFICIAL SEQUENCE
  Synthetic Construct
EKILAK

SEQ ID NO: 10590 - protein, 6 aa, ARTIFICIAL SEQUENCE
  Synthetic Construct
EKILDK

SEQ ID NO: 10591 - protein, 6 aa, ARTIFICIAL SEQUENCE
  Synthetic Construct
EKILEK

SEQ ID NO: 10592 - protein, 6 aa, ARTIFICIAL SEQUENCE
  Synthetic Construct
EKILFK

SEQ ID NO: 10593 - protein, 6 aa, ARTIFICIAL SEQUENCE
  Synthetic Construct
EKILGK

SEQ ID NO: 10594 - protein, 6 aa, ARTIFICIAL SEQUENCE
  Synthetic Construct
EKILHK

SEQ ID NO: 10595 - protein, 6 aa, ARTIFICIAL SEQUENCE
  Synthetic Construct
EKILIK

SEQ ID NO: 10596 - protein, 6 aa, ARTIFICIAL SEQUENCE
  Synthetic Construct
EKILLK

SEQ ID NO: 10597 - protein, 6 aa, ARTIFICIAL SEQUENCE
  Synthetic Construct
EKILNK

SEQ ID NO: 10598 - protein, 6 aa, ARTIFICIAL SEQUENCE
  Synthetic Construct
EKILQK

SEQ ID NO: 10599 - protein, 6 aa, ARTIFICIAL SEQUENCE
  Synthetic Construct
EKILRK

SEQ ID NO: 10600 - protein, 6 aa, ARTIFICIAL SEQUENCE
  Synthetic Construct
EKILSK

SEQ ID NO: 10601 - protein, 6 aa, ARTIFICIAL SEQUENCE
  Synthetic Construct
EKILTK

SEQ ID NO: 10602 - protein, 6 aa, ARTIFICIAL SEQUENCE
  Synthetic Construct
EKILYK

SEQ ID NO: 10603 - protein, 6 aa, ARTIFICIAL SEQUENCE
  Synthetic Construct
EKINAK

SEQ ID NO: 10604 - protein, 6 aa, ARTIFICIAL SEQUENCE
  Synthetic Construct
EKINDK

SEQ ID NO: 10605 - protein, 6 aa, ARTIFICIAL SEQUENCE
  Synthetic Construct
EKINEK

SEQ ID NO: 10606 - protein, 6 aa, ARTIFICIAL SEQUENCE
  Synthetic Construct
EKINFK

SEQ ID NO: 10607 - protein, 6 aa, ARTIFICIAL SEQUENCE
  Synthetic Construct
EKINGK

SEQ ID NO: 10608 - protein, 6 aa, ARTIFICIAL SEQUENCE
  Synthetic Construct
EKINHK

SEQ ID NO: 10609 - protein, 6 aa, ARTIFICIAL SEQUENCE
  Synthetic Construct
EKINIK

SEQ ID NO: 10610 - protein, 6 aa, ARTIFICIAL SEQUENCE
  Synthetic Construct
EKINLK

SEQ ID NO: 10611 - protein, 6 aa, ARTIFICIAL SEQUENCE
  Synthetic Construct
EKINNK

SEQ ID NO: 10612 - protein, 6 aa, ARTIFICIAL SEQUENCE
  Synthetic Construct
EKINQK

SEQ ID NO: 10613 - protein, 6 aa, ARTIFICIAL SEQUENCE
  Synthetic Construct
EKINRK

SEQ ID NO: 10614 - protein, 6 aa, ARTIFICIAL SEQUENCE
  Synthetic Construct
EKINSK

SEQ ID NO: 10615 - protein, 6 aa, ARTIFICIAL SEQUENCE
  Synthetic Construct
EKINTK

SEQ ID NO: 10616 - protein, 6 aa, ARTIFICIAL SEQUENCE
  Synthetic Construct
EKINYK

SEQ ID NO: 10617 - protein, 6 aa, ARTIFICIAL SEQUENCE
  Synthetic Construct
EKIQAK

SEQ ID NO: 10618 - protein, 6 aa, ARTIFICIAL SEQUENCE
  Synthetic Construct
EKIQDK

SEQ ID NO: 10619 - protein, 6 aa, ARTIFICIAL SEQUENCE
  Synthetic Construct
EKIQEK

SEQ ID NO: 10620 - protein, 6 aa, ARTIFICIAL SEQUENCE
  Synthetic Construct
EKIQFK

SEQ ID NO: 10621 - protein, 6 aa, ARTIFICIAL SEQUENCE
  Synthetic Construct
EKIQGK

SEQ ID NO: 10622 - protein, 6 aa, ARTIFICIAL SEQUENCE
  Synthetic Construct
EKIQHK

SEQ ID NO: 10623 - protein, 6 aa, ARTIFICIAL SEQUENCE
  Synthetic Construct
EKIQIK

SEQ ID NO: 10624 - protein, 6 aa, ARTIFICIAL SEQUENCE
  Synthetic Construct
EKIQLK

SEQ ID NO: 10625 - protein, 6 aa, ARTIFICIAL SEQUENCE
  Synthetic Construct
EKIQNK

SEQ ID NO: 10626 - protein, 6 aa, ARTIFICIAL SEQUENCE
  Synthetic Construct
EKIQQK

SEQ ID NO: 10627 - protein, 6 aa, ARTIFICIAL SEQUENCE
  Synthetic Construct
EKIQRK

SEQ ID NO: 10628 - protein, 6 aa, ARTIFICIAL SEQUENCE
  Synthetic Construct
EKIQSK

SEQ ID NO: 10629 - protein, 6 aa, ARTIFICIAL SEQUENCE
  Synthetic Construct
EKIQTK

SEQ ID NO: 10630 - protein, 6 aa, ARTIFICIAL SEQUENCE
  Synthetic Construct
EKIQYK

SEQ ID NO: 10631 - protein, 6 aa, ARTIFICIAL SEQUENCE
  Synthetic Construct
EKIRAK

SEQ ID NO: 10632 - protein, 6 aa, ARTIFICIAL SEQUENCE
  Synthetic Construct
EKIRDK

SEQ ID NO: 10633 - protein, 6 aa, ARTIFICIAL SEQUENCE
  Synthetic Construct
EKIREK

SEQ ID NO: 10634 - protein, 6 aa, ARTIFICIAL SEQUENCE
  Synthetic Construct
EKIRFK

SEQ ID NO: 10635 - protein, 6 aa, ARTIFICIAL SEQUENCE
  Synthetic Construct
EKIRGK

SEQ ID NO: 10636 - protein, 6 aa, ARTIFICIAL SEQUENCE
  Synthetic Construct
EKIRHK

SEQ ID NO: 10637 - protein, 6 aa, ARTIFICIAL SEQUENCE
  Synthetic Construct
EKIRIK

SEQ ID NO: 10638 - protein, 6 aa, ARTIFICIAL SEQUENCE
  Synthetic Construct
EKIRLK

SEQ ID NO: 10639 - protein, 6 aa, ARTIFICIAL SEQUENCE
  Synthetic Construct
EKIRNK

SEQ ID NO: 10640 - protein, 6 aa, ARTIFICIAL SEQUENCE
  Synthetic Construct
EKIRQK

SEQ ID NO: 10641 - protein, 6 aa, ARTIFICIAL SEQUENCE
  Synthetic Construct
EKIRRK

SEQ ID NO: 10642 - protein, 6 aa, ARTIFICIAL SEQUENCE
  Synthetic Construct
EKIRSK

SEQ ID NO: 10643 - protein, 6 aa, ARTIFICIAL SEQUENCE
  Synthetic Construct
EKIRTK

SEQ ID NO: 10644 - protein, 6 aa, ARTIFICIAL SEQUENCE
  Synthetic Construct
EKIRYK

SEQ ID NO: 10645 - protein, 6 aa, ARTIFICIAL SEQUENCE
  Synthetic Construct
EKISAK

SEQ ID NO: 10646 - protein, 6 aa, ARTIFICIAL SEQUENCE
  Synthetic Construct
EKISDK

SEQ ID NO: 10647 - protein, 6 aa, ARTIFICIAL SEQUENCE
  Synthetic Construct
EKISEK

SEQ ID NO: 10648 - protein, 6 aa, ARTIFICIAL SEQUENCE
  Synthetic Construct
EKISFK

SEQ ID NO: 10649 - protein, 6 aa, ARTIFICIAL SEQUENCE
  Synthetic Construct
EKISGK

SEQ ID NO: 10650 - protein, 6 aa, ARTIFICIAL SEQUENCE
  Synthetic Construct
EKISHK

SEQ ID NO: 10651 - protein, 6 aa, ARTIFICIAL SEQUENCE
  Synthetic Construct
EKISIK

SEQ ID NO: 10652 - protein, 6 aa, ARTIFICIAL SEQUENCE
  Synthetic Construct
EKISLK

SEQ ID NO: 10653 - protein, 6 aa, ARTIFICIAL SEQUENCE
  Synthetic Construct
EKISNK

SEQ ID NO: 10654 - protein, 6 aa, ARTIFICIAL SEQUENCE
  Synthetic Construct
EKISQK

SEQ ID NO: 10655 - protein, 6 aa, ARTIFICIAL SEQUENCE
  Synthetic Construct
EKISRK

SEQ ID NO: 10656 - protein, 6 aa, ARTIFICIAL SEQUENCE
  Synthetic Construct
EKISSK

SEQ ID NO: 10657 - protein, 6 aa, ARTIFICIAL SEQUENCE
  Synthetic Construct
EKISTK

SEQ ID NO: 10658 - protein, 6 aa, ARTIFICIAL SEQUENCE
  Synthetic Construct
EKISYK

SEQ ID NO: 10659 - protein, 6 aa, ARTIFICIAL SEQUENCE
  Synthetic Construct
EKITAK

SEQ ID NO: 10660 - protein, 6 aa, ARTIFICIAL SEQUENCE
  Synthetic Construct
EKITDK

SEQ ID NO: 10661 - protein, 6 aa, ARTIFICIAL SEQUENCE
  Synthetic Construct
EKITEK

SEQ ID NO: 10662 - protein, 6 aa, ARTIFICIAL SEQUENCE
  Synthetic Construct
EKITFK

SEQ ID NO: 10663 - protein, 6 aa, ARTIFICIAL SEQUENCE
  Synthetic Construct
EKITGK

SEQ ID NO: 10664 - protein, 6 aa, ARTIFICIAL SEQUENCE
  Synthetic Construct
EKITHK

SEQ ID NO: 10665 - protein, 6 aa, ARTIFICIAL SEQUENCE
  Synthetic Construct
EKITIK

SEQ ID NO: 10666 - protein, 6 aa, ARTIFICIAL SEQUENCE
  Synthetic Construct
EKITLK

SEQ ID NO: 10667 - protein, 6 aa, ARTIFICIAL SEQUENCE
  Synthetic Construct
EKITNK

SEQ ID NO: 10668 - protein, 6 aa, ARTIFICIAL SEQUENCE
  Synthetic Construct
EKITQK

SEQ ID NO: 10669 - protein, 6 aa, ARTIFICIAL SEQUENCE
  Synthetic Construct
EKITRK

SEQ ID NO: 10670 - protein, 6 aa, ARTIFICIAL SEQUENCE
  Synthetic Construct
EKITSK

SEQ ID NO: 10671 - protein, 6 aa, ARTIFICIAL SEQUENCE
  Synthetic Construct
EKITTK

SEQ ID NO: 10672 - protein, 6 aa, ARTIFICIAL SEQUENCE
  Synthetic Construct
EKITYK

SEQ ID NO: 10673 - protein, 6 aa, ARTIFICIAL SEQUENCE
  Synthetic Construct
EKIYAK

SEQ ID NO: 10674 - protein, 6 aa, ARTIFICIAL SEQUENCE
  Synthetic Construct
EKIYDK

SEQ ID NO: 10675 - protein, 6 aa, ARTIFICIAL SEQUENCE
  Synthetic Construct
EKIYEK

SEQ ID NO: 10676 - protein, 6 aa, ARTIFICIAL SEQUENCE
  Synthetic Construct
EKIYFK

SEQ ID NO: 10677 - protein, 6 aa, ARTIFICIAL SEQUENCE
  Synthetic Construct
EKIYGK

SEQ ID NO: 10678 - protein, 6 aa, ARTIFICIAL SEQUENCE
  Synthetic Construct
EKIYHK

SEQ ID NO: 10679 - protein, 6 aa, ARTIFICIAL SEQUENCE
  Synthetic Construct
EKIYIK

SEQ ID NO: 10680 - protein, 6 aa, ARTIFICIAL SEQUENCE
  Synthetic Construct
EKIYLK

SEQ ID NO: 10681 - protein, 6 aa, ARTIFICIAL SEQUENCE
  Synthetic Construct
EKIYNK

SEQ ID NO: 10682 - protein, 6 aa, ARTIFICIAL SEQUENCE
  Synthetic Construct
EKIYQK

SEQ ID NO: 10683 - protein, 6 aa, ARTIFICIAL SEQUENCE
  Synthetic Construct
EKIYRK

SEQ ID NO: 10684 - protein, 6 aa, ARTIFICIAL SEQUENCE
  Synthetic Construct
EKIYSK

SEQ ID NO: 10685 - protein, 6 aa, ARTIFICIAL SEQUENCE
  Synthetic Construct
EKIYTK

SEQ ID NO: 10686 - protein, 6 aa, ARTIFICIAL SEQUENCE
  Synthetic Construct
EKIYYK

SEQ ID NO: 10687 - protein, 6 aa, ARTIFICIAL SEQUENCE
  Synthetic Construct
EKLAAK

SEQ ID NO: 10688 - protein, 6 aa, ARTIFICIAL SEQUENCE
  Synthetic Construct
EKLADK

SEQ ID NO: 10689 - protein, 6 aa, ARTIFICIAL SEQUENCE
  Synthetic Construct
EKLAEK

SEQ ID NO: 10690 - protein, 6 aa, ARTIFICIAL SEQUENCE
  Synthetic Construct
EKLAFK

SEQ ID NO: 10691 - protein, 6 aa, ARTIFICIAL SEQUENCE
  Synthetic Construct
EKLAGK

SEQ ID NO: 10692 - protein, 6 aa, ARTIFICIAL SEQUENCE
  Synthetic Construct
EKLAHK

SEQ ID NO: 10693 - protein, 6 aa, ARTIFICIAL SEQUENCE
  Synthetic Construct
EKLAIK

SEQ ID NO: 10694 - protein, 6 aa, ARTIFICIAL SEQUENCE
  Synthetic Construct
EKLALK

SEQ ID NO: 10695 - protein, 6 aa, ARTIFICIAL SEQUENCE
  Synthetic Construct
EKLANK

SEQ ID NO: 10696 - protein, 6 aa, ARTIFICIAL SEQUENCE
  Synthetic Construct
EKLAQK

SEQ ID NO: 10697 - protein, 6 aa, ARTIFICIAL SEQUENCE
  Synthetic Construct
EKLARK

SEQ ID NO: 10698 - protein, 6 aa, ARTIFICIAL SEQUENCE
  Synthetic Construct
EKLASK

SEQ ID NO: 10699 - protein, 6 aa, ARTIFICIAL SEQUENCE
  Synthetic Construct
EKLATK

SEQ ID NO: 10700 - protein, 6 aa, ARTIFICIAL SEQUENCE
  Synthetic Construct
EKLAYK

SEQ ID NO: 10701 - protein, 6 aa, ARTIFICIAL SEQUENCE
  Synthetic Construct
EKLDAK

SEQ ID NO: 10702 - protein, 6 aa, ARTIFICIAL SEQUENCE
  Synthetic Construct
EKLDDK

SEQ ID NO: 10703 - protein, 6 aa, ARTIFICIAL SEQUENCE
  Synthetic Construct
EKLDEK

SEQ ID NO: 10704 - protein, 6 aa, ARTIFICIAL SEQUENCE
  Synthetic Construct
EKLDFK

SEQ ID NO: 10705 - protein, 6 aa, ARTIFICIAL SEQUENCE
  Synthetic Construct
EKLDGK

SEQ ID NO: 10706 - protein, 6 aa, ARTIFICIAL SEQUENCE
  Synthetic Construct
EKLDHK

SEQ ID NO: 10707 - protein, 6 aa, ARTIFICIAL SEQUENCE
  Synthetic Construct
EKLDIK

SEQ ID NO: 10708 - protein, 6 aa, ARTIFICIAL SEQUENCE
  Synthetic Construct
EKLDLK

SEQ ID NO: 10709 - protein, 6 aa, ARTIFICIAL SEQUENCE
  Synthetic Construct
EKLDNK

SEQ ID NO: 10710 - protein, 6 aa, ARTIFICIAL SEQUENCE
  Synthetic Construct
EKLDQK

SEQ ID NO: 10711 - protein, 6 aa, ARTIFICIAL SEQUENCE
  Synthetic Construct
EKLDRK

SEQ ID NO: 10712 - protein, 6 aa, ARTIFICIAL SEQUENCE
  Synthetic Construct
EKLDSK

SEQ ID NO: 10713 - protein, 6 aa, ARTIFICIAL SEQUENCE
  Synthetic Construct
EKLDTK

SEQ ID NO: 10714 - protein, 6 aa, ARTIFICIAL SEQUENCE
  Synthetic Construct
EKLDYK

SEQ ID NO: 10715 - protein, 6 aa, ARTIFICIAL SEQUENCE
  Synthetic Construct
EKLEAK

SEQ ID NO: 10716 - protein, 6 aa, ARTIFICIAL SEQUENCE
  Synthetic Construct
EKLEDK

SEQ ID NO: 10717 - protein, 6 aa, ARTIFICIAL SEQUENCE
  Synthetic Construct
EKLEEK

SEQ ID NO: 10718 - protein, 6 aa, ARTIFICIAL SEQUENCE
  Synthetic Construct
EKLEFK

SEQ ID NO: 10719 - protein, 6 aa, ARTIFICIAL SEQUENCE
  Synthetic Construct
EKLEGK

SEQ ID NO: 10720 - protein, 6 aa, ARTIFICIAL SEQUENCE
  Synthetic Construct
EKLEHK

SEQ ID NO: 10721 - protein, 6 aa, ARTIFICIAL SEQUENCE
  Synthetic Construct
EKLEIK

SEQ ID NO: 10722 - protein, 6 aa, ARTIFICIAL SEQUENCE
  Synthetic Construct
EKLELK

SEQ ID NO: 10723 - protein, 6 aa, ARTIFICIAL SEQUENCE
  Synthetic Construct
EKLENK

SEQ ID NO: 10724 - protein, 6 aa, ARTIFICIAL SEQUENCE
  Synthetic Construct
EKLEQK

SEQ ID NO: 10725 - protein, 6 aa, ARTIFICIAL SEQUENCE
  Synthetic Construct
EKLERK

SEQ ID NO: 10726 - protein, 6 aa, ARTIFICIAL SEQUENCE
  Synthetic Construct
EKLESK

SEQ ID NO: 10727 - protein, 6 aa, ARTIFICIAL SEQUENCE
  Synthetic Construct
EKLETK

SEQ ID NO: 10728 - protein, 6 aa, ARTIFICIAL SEQUENCE
  Synthetic Construct
EKLEYK

SEQ ID NO: 10729 - protein, 6 aa, ARTIFICIAL SEQUENCE
  Synthetic Construct
EKLFAK

SEQ ID NO: 10730 - protein, 6 aa, ARTIFICIAL SEQUENCE
  Synthetic Construct
EKLFDK

SEQ ID NO: 10731 - protein, 6 aa, ARTIFICIAL SEQUENCE
  Synthetic Construct
EKLFEK

SEQ ID NO: 10732 - protein, 6 aa, ARTIFICIAL SEQUENCE
  Synthetic Construct
EKLFFK

SEQ ID NO: 10733 - protein, 6 aa, ARTIFICIAL SEQUENCE
  Synthetic Construct
EKLFGK

SEQ ID NO: 10734 - protein, 6 aa, ARTIFICIAL SEQUENCE
  Synthetic Construct
EKLFHK

SEQ ID NO: 10735 - protein, 6 aa, ARTIFICIAL SEQUENCE
  Synthetic Construct
EKLFIK

SEQ ID NO: 10736 - protein, 6 aa, ARTIFICIAL SEQUENCE
  Synthetic Construct
EKLFLK

SEQ ID NO: 10737 - protein, 6 aa, ARTIFICIAL SEQUENCE
  Synthetic Construct
EKLFNK

SEQ ID NO: 10738 - protein, 6 aa, ARTIFICIAL SEQUENCE
  Synthetic Construct
EKLFQK

SEQ ID NO: 10739 - protein, 6 aa, ARTIFICIAL SEQUENCE
  Synthetic Construct
EKLFRK

SEQ ID NO: 10740 - protein, 6 aa, ARTIFICIAL SEQUENCE
  Synthetic Construct
EKLFSK

SEQ ID NO: 10741 - protein, 6 aa, ARTIFICIAL SEQUENCE
  Synthetic Construct
EKLFTK

SEQ ID NO: 10742 - protein, 6 aa, ARTIFICIAL SEQUENCE
  Synthetic Construct
EKLFYK

SEQ ID NO: 10743 - protein, 6 aa, ARTIFICIAL SEQUENCE
  Synthetic Construct
EKLGAK

SEQ ID NO: 10744 - protein, 6 aa, ARTIFICIAL SEQUENCE
  Synthetic Construct
EKLGDK

SEQ ID NO: 10745 - protein, 6 aa, ARTIFICIAL SEQUENCE
  Synthetic Construct
EKLGEK

SEQ ID NO: 10746 - protein, 6 aa, ARTIFICIAL SEQUENCE
  Synthetic Construct
EKLGFK

SEQ ID NO: 10747 - protein, 6 aa, ARTIFICIAL SEQUENCE
  Synthetic Construct
EKLGGK

SEQ ID NO: 10748 - protein, 6 aa, ARTIFICIAL SEQUENCE
  Synthetic Construct
EKLGHK

SEQ ID NO: 10749 - protein, 6 aa, ARTIFICIAL SEQUENCE
  Synthetic Construct
EKLGIK

SEQ ID NO: 10750 - protein, 6 aa, ARTIFICIAL SEQUENCE
  Synthetic Construct
EKLGLK

SEQ ID NO: 10751 - protein, 6 aa, ARTIFICIAL SEQUENCE
  Synthetic Construct
EKLGNK

SEQ ID NO: 10752 - protein, 6 aa, ARTIFICIAL SEQUENCE
  Synthetic Construct
EKLGQK

SEQ ID NO: 10753 - protein, 6 aa, ARTIFICIAL SEQUENCE
  Synthetic Construct
EKLGRK

SEQ ID NO: 10754 - protein, 6 aa, ARTIFICIAL SEQUENCE
  Synthetic Construct
EKLGSK

SEQ ID NO: 10755 - protein, 6 aa, ARTIFICIAL SEQUENCE
  Synthetic Construct
EKLGTK

SEQ ID NO: 10756 - protein, 6 aa, ARTIFICIAL SEQUENCE
  Synthetic Construct
EKLGYK

SEQ ID NO: 10757 - protein, 6 aa, ARTIFICIAL SEQUENCE
  Synthetic Construct
EKLHAK

SEQ ID NO: 10758 - protein, 6 aa, ARTIFICIAL SEQUENCE
  Synthetic Construct
EKLHDK

SEQ ID NO: 10759 - protein, 6 aa, ARTIFICIAL SEQUENCE
  Synthetic Construct
EKLHEK

SEQ ID NO: 10760 - protein, 6 aa, ARTIFICIAL SEQUENCE
  Synthetic Construct
EKLHFK

SEQ ID NO: 10761 - protein, 6 aa, ARTIFICIAL SEQUENCE
  Synthetic Construct
EKLHGK

SEQ ID NO: 10762 - protein, 6 aa, ARTIFICIAL SEQUENCE
  Synthetic Construct
EKLHHK

SEQ ID NO: 10763 - protein, 6 aa, ARTIFICIAL SEQUENCE
  Synthetic Construct
EKLHIK

SEQ ID NO: 10764 - protein, 6 aa, ARTIFICIAL SEQUENCE
  Synthetic Construct
EKLHLK

SEQ ID NO: 10765 - protein, 6 aa, ARTIFICIAL SEQUENCE
  Synthetic Construct
EKLHNK

SEQ ID NO: 10766 - protein, 6 aa, ARTIFICIAL SEQUENCE
  Synthetic Construct
EKLHQK

SEQ ID NO: 10767 - protein, 6 aa, ARTIFICIAL SEQUENCE
  Synthetic Construct
EKLHRK

SEQ ID NO: 10768 - protein, 6 aa, ARTIFICIAL SEQUENCE
  Synthetic Construct
EKLHSK

SEQ ID NO: 10769 - protein, 6 aa, ARTIFICIAL SEQUENCE
  Synthetic Construct
EKLHTK

SEQ ID NO: 10770 - protein, 6 aa, ARTIFICIAL SEQUENCE
  Synthetic Construct
EKLHYK

SEQ ID NO: 10771 - protein, 6 aa, ARTIFICIAL SEQUENCE
  Synthetic Construct
EKLIAK

SEQ ID NO: 10772 - protein, 6 aa, ARTIFICIAL SEQUENCE
  Synthetic Construct
EKLIDK

SEQ ID NO: 10773 - protein, 6 aa, ARTIFICIAL SEQUENCE
  Synthetic Construct
EKLIEK

SEQ ID NO: 10774 - protein, 6 aa, ARTIFICIAL SEQUENCE
  Synthetic Construct
EKLIFK

SEQ ID NO: 10775 - protein, 6 aa, ARTIFICIAL SEQUENCE
  Synthetic Construct
EKLIGK

SEQ ID NO: 10776 - protein, 6 aa, ARTIFICIAL SEQUENCE
  Synthetic Construct
EKLIHK

SEQ ID NO: 10777 - protein, 6 aa, ARTIFICIAL SEQUENCE
  Synthetic Construct
EKLIIK

SEQ ID NO: 10778 - protein, 6 aa, ARTIFICIAL SEQUENCE
  Synthetic Construct
EKLILK

SEQ ID NO: 10779 - protein, 6 aa, ARTIFICIAL SEQUENCE
  Synthetic Construct
EKLINK

SEQ ID NO: 10780 - protein, 6 aa, ARTIFICIAL SEQUENCE
  Synthetic Construct
EKLIQK

SEQ ID NO: 10781 - protein, 6 aa, ARTIFICIAL SEQUENCE
  Synthetic Construct
EKLIRK

SEQ ID NO: 10782 - protein, 6 aa, ARTIFICIAL SEQUENCE
  Synthetic Construct
EKLISK

SEQ ID NO: 10783 - protein, 6 aa, ARTIFICIAL SEQUENCE
  Synthetic Construct
EKLITK

SEQ ID NO: 10784 - protein, 6 aa, ARTIFICIAL SEQUENCE
  Synthetic Construct
EKLIYK

SEQ ID NO: 10785 - protein, 6 aa, ARTIFICIAL SEQUENCE
  Synthetic Construct
EKLLAK

SEQ ID NO: 10786 - protein, 6 aa, ARTIFICIAL SEQUENCE
  Synthetic Construct
EKLLDK

SEQ ID NO: 10787 - protein, 6 aa, ARTIFICIAL SEQUENCE
  Synthetic Construct
EKLLEK

SEQ ID NO: 10788 - protein, 6 aa, ARTIFICIAL SEQUENCE
  Synthetic Construct
EKLLFK

SEQ ID NO: 10789 - protein, 6 aa, ARTIFICIAL SEQUENCE
  Synthetic Construct
EKLLGK

SEQ ID NO: 10790 - protein, 6 aa, ARTIFICIAL SEQUENCE
  Synthetic Construct
EKLLHK

SEQ ID NO: 10791 - protein, 6 aa, ARTIFICIAL SEQUENCE
  Synthetic Construct
EKLLIK

SEQ ID NO: 10792 - protein, 6 aa, ARTIFICIAL SEQUENCE
  Synthetic Construct
EKLLLK

SEQ ID NO: 10793 - protein, 6 aa, ARTIFICIAL SEQUENCE
  Synthetic Construct
EKLLNK

SEQ ID NO: 10794 - protein, 6 aa, ARTIFICIAL SEQUENCE
  Synthetic Construct
EKLLQK

SEQ ID NO: 10795 - protein, 6 aa, ARTIFICIAL SEQUENCE
  Synthetic Construct
EKLLRK

SEQ ID NO: 10796 - protein, 6 aa, ARTIFICIAL SEQUENCE
  Synthetic Construct
EKLLSK

SEQ ID NO: 10797 - protein, 6 aa, ARTIFICIAL SEQUENCE
  Synthetic Construct
EKLLTK

SEQ ID NO: 10798 - protein, 6 aa, ARTIFICIAL SEQUENCE
  Synthetic Construct
EKLLYK

SEQ ID NO: 10799 - protein, 6 aa, ARTIFICIAL SEQUENCE
  Synthetic Construct
EKLNAK

SEQ ID NO: 10800 - protein, 6 aa, ARTIFICIAL SEQUENCE
  Synthetic Construct
EKLNDK

SEQ ID NO: 10801 - protein, 6 aa, ARTIFICIAL SEQUENCE
  Synthetic Construct
EKLNEK

SEQ ID NO: 10802 - protein, 6 aa, ARTIFICIAL SEQUENCE
  Synthetic Construct
EKLNFK

SEQ ID NO: 10803 - protein, 6 aa, ARTIFICIAL SEQUENCE
  Synthetic Construct
EKLNGK

SEQ ID NO: 10804 - protein, 6 aa, ARTIFICIAL SEQUENCE
  Synthetic Construct
EKLNHK

SEQ ID NO: 10805 - protein, 6 aa, ARTIFICIAL SEQUENCE
  Synthetic Construct
EKLNIK

SEQ ID NO: 10806 - protein, 6 aa, ARTIFICIAL SEQUENCE
  Synthetic Construct
EKLNLK

SEQ ID NO: 10807 - protein, 6 aa, ARTIFICIAL SEQUENCE
  Synthetic Construct
EKLNNK

SEQ ID NO: 10808 - protein, 6 aa, ARTIFICIAL SEQUENCE
  Synthetic Construct
EKLNQK

SEQ ID NO: 10809 - protein, 6 aa, ARTIFICIAL SEQUENCE
  Synthetic Construct
EKLNRK

SEQ ID NO: 10810 - protein, 6 aa, ARTIFICIAL SEQUENCE
  Synthetic Construct
EKLNSK

SEQ ID NO: 10811 - protein, 6 aa, ARTIFICIAL SEQUENCE
  Synthetic Construct
EKLNTK

SEQ ID NO: 10812 - protein, 6 aa, ARTIFICIAL SEQUENCE
  Synthetic Construct
EKLNYK

SEQ ID NO: 10813 - protein, 6 aa, ARTIFICIAL SEQUENCE
  Synthetic Construct
EKLQAK

SEQ ID NO: 10814 - protein, 6 aa, ARTIFICIAL SEQUENCE
  Synthetic Construct
EKLQDK

SEQ ID NO: 10815 - protein, 6 aa, ARTIFICIAL SEQUENCE
  Synthetic Construct
EKLQEK

SEQ ID NO: 10816 - protein, 6 aa, ARTIFICIAL SEQUENCE
  Synthetic Construct
EKLQFK

SEQ ID NO: 10817 - protein, 6 aa, ARTIFICIAL SEQUENCE
  Synthetic Construct
EKLQGK

SEQ ID NO: 10818 - protein, 6 aa, ARTIFICIAL SEQUENCE
  Synthetic Construct
EKLQHK

SEQ ID NO: 10819 - protein, 6 aa, ARTIFICIAL SEQUENCE
  Synthetic Construct
EKLQIK

SEQ ID NO: 10820 - protein, 6 aa, ARTIFICIAL SEQUENCE
  Synthetic Construct
EKLQLK

SEQ ID NO: 10821 - protein, 6 aa, ARTIFICIAL SEQUENCE
  Synthetic Construct
EKLQNK

SEQ ID NO: 10822 - protein, 6 aa, ARTIFICIAL SEQUENCE
  Synthetic Construct
EKLQQK

SEQ ID NO: 10823 - protein, 6 aa, ARTIFICIAL SEQUENCE
  Synthetic Construct
EKLQRK

SEQ ID NO: 10824 - protein, 6 aa, ARTIFICIAL SEQUENCE
  Synthetic Construct
EKLQSK

SEQ ID NO: 10825 - protein, 6 aa, ARTIFICIAL SEQUENCE
  Synthetic Construct
EKLQTK

SEQ ID NO: 10826 - protein, 6 aa, ARTIFICIAL SEQUENCE
  Synthetic Construct
EKLQYK

SEQ ID NO: 10827 - protein, 6 aa, ARTIFICIAL SEQUENCE
  Synthetic Construct
EKLRAK

SEQ ID NO: 10828 - protein, 6 aa, ARTIFICIAL SEQUENCE
  Synthetic Construct
EKLRDK

SEQ ID NO: 10829 - protein, 6 aa, ARTIFICIAL SEQUENCE
  Synthetic Construct
EKLREK

SEQ ID NO: 10830 - protein, 6 aa, ARTIFICIAL SEQUENCE
  Synthetic Construct
EKLRFK

SEQ ID NO: 10831 - protein, 6 aa, ARTIFICIAL SEQUENCE
  Synthetic Construct
EKLRGK

SEQ ID NO: 10832 - protein, 6 aa, ARTIFICIAL SEQUENCE
  Synthetic Construct
EKLRHK

SEQ ID NO: 10833 - protein, 6 aa, ARTIFICIAL SEQUENCE
  Synthetic Construct
EKLRIK

SEQ ID NO: 10834 - protein, 6 aa, ARTIFICIAL SEQUENCE
  Synthetic Construct
EKLRLK

SEQ ID NO: 10835 - protein, 6 aa, ARTIFICIAL SEQUENCE
  Synthetic Construct
EKLRNK

SEQ ID NO: 10836 - protein, 6 aa, ARTIFICIAL SEQUENCE
  Synthetic Construct
EKLRQK

SEQ ID NO: 10837 - protein, 6 aa, ARTIFICIAL SEQUENCE
  Synthetic Construct
EKLRRK

SEQ ID NO: 10838 - protein, 6 aa, ARTIFICIAL SEQUENCE
  Synthetic Construct
EKLRSK

SEQ ID NO: 10839 - protein, 6 aa, ARTIFICIAL SEQUENCE
  Synthetic Construct
EKLRTK

SEQ ID NO: 10840 - protein, 6 aa, ARTIFICIAL SEQUENCE
  Synthetic Construct
EKLRYK

SEQ ID NO: 10841 - protein, 6 aa, ARTIFICIAL SEQUENCE
  Synthetic Construct
EKLSAK

SEQ ID NO: 10842 - protein, 6 aa, ARTIFICIAL SEQUENCE
  Synthetic Construct
EKLSDK

SEQ ID NO: 10843 - protein, 6 aa, ARTIFICIAL SEQUENCE
  Synthetic Construct
EKLSEK

SEQ ID NO: 10844 - protein, 6 aa, ARTIFICIAL SEQUENCE
  Synthetic Construct
EKLSFK

SEQ ID NO: 10845 - protein, 6 aa, ARTIFICIAL SEQUENCE
  Synthetic Construct
EKLSGK

SEQ ID NO: 10846 - protein, 6 aa, ARTIFICIAL SEQUENCE
  Synthetic Construct
EKLSHK

SEQ ID NO: 10847 - protein, 6 aa, ARTIFICIAL SEQUENCE
  Synthetic Construct
EKLSIK

SEQ ID NO: 10848 - protein, 6 aa, ARTIFICIAL SEQUENCE
  Synthetic Construct
EKLSLK

SEQ ID NO: 10849 - protein, 6 aa, ARTIFICIAL SEQUENCE
  Synthetic Construct
EKLSNK

SEQ ID NO: 10850 - protein, 6 aa, ARTIFICIAL SEQUENCE
  Synthetic Construct
EKLSQK

SEQ ID NO: 10851 - protein, 6 aa, ARTIFICIAL SEQUENCE
  Synthetic Construct
EKLSRK

SEQ ID NO: 10852 - protein, 6 aa, ARTIFICIAL SEQUENCE
  Synthetic Construct
EKLSSK

SEQ ID NO: 10853 - protein, 6 aa, ARTIFICIAL SEQUENCE
  Synthetic Construct
EKLSTK

SEQ ID NO: 10854 - protein, 6 aa, ARTIFICIAL SEQUENCE
  Synthetic Construct
EKLSYK

SEQ ID NO: 10855 - protein, 6 aa, ARTIFICIAL SEQUENCE
  Synthetic Construct
EKLTAK

SEQ ID NO: 10856 - protein, 6 aa, ARTIFICIAL SEQUENCE
  Synthetic Construct
EKLTDK

SEQ ID NO: 10857 - protein, 6 aa, ARTIFICIAL SEQUENCE
  Synthetic Construct
EKLTEK

SEQ ID NO: 10858 - protein, 6 aa, ARTIFICIAL SEQUENCE
  Synthetic Construct
EKLTFK

SEQ ID NO: 10859 - protein, 6 aa, ARTIFICIAL SEQUENCE
  Synthetic Construct
EKLTGK

SEQ ID NO: 10860 - protein, 6 aa, ARTIFICIAL SEQUENCE
  Synthetic Construct
EKLTHK

SEQ ID NO: 10861 - protein, 6 aa, ARTIFICIAL SEQUENCE
  Synthetic Construct
EKLTIK

SEQ ID NO: 10862 - protein, 6 aa, ARTIFICIAL SEQUENCE
  Synthetic Construct
EKLTLK

SEQ ID NO: 10863 - protein, 6 aa, ARTIFICIAL SEQUENCE
  Synthetic Construct
EKLTNK

SEQ ID NO: 10864 - protein, 6 aa, ARTIFICIAL SEQUENCE
  Synthetic Construct
EKLTQK

SEQ ID NO: 10865 - protein, 6 aa, ARTIFICIAL SEQUENCE
  Synthetic Construct
EKLTRK

SEQ ID NO: 10866 - protein, 6 aa, ARTIFICIAL SEQUENCE
  Synthetic Construct
EKLTSK

SEQ ID NO: 10867 - protein, 6 aa, ARTIFICIAL SEQUENCE
  Synthetic Construct
EKLTTK

SEQ ID NO: 10868 - protein, 6 aa, ARTIFICIAL SEQUENCE
  Synthetic Construct
EKLTYK

SEQ ID NO: 10869 - protein, 6 aa, ARTIFICIAL SEQUENCE
  Synthetic Construct
EKLYAK

SEQ ID NO: 10870 - protein, 6 aa, ARTIFICIAL SEQUENCE
  Synthetic Construct
EKLYDK

SEQ ID NO: 10871 - protein, 6 aa, ARTIFICIAL SEQUENCE
  Synthetic Construct
EKLYEK

SEQ ID NO: 10872 - protein, 6 aa, ARTIFICIAL SEQUENCE
  Synthetic Construct
EKLYFK

SEQ ID NO: 10873 - protein, 6 aa, ARTIFICIAL SEQUENCE
  Synthetic Construct
EKLYGK

SEQ ID NO: 10874 - protein, 6 aa, ARTIFICIAL SEQUENCE
  Synthetic Construct
EKLYHK

SEQ ID NO: 10875 - protein, 6 aa, ARTIFICIAL SEQUENCE
  Synthetic Construct
EKLYIK

SEQ ID NO: 10876 - protein, 6 aa, ARTIFICIAL SEQUENCE
  Synthetic Construct
EKLYLK

SEQ ID NO: 10877 - protein, 6 aa, ARTIFICIAL SEQUENCE
  Synthetic Construct
EKLYNK

SEQ ID NO: 10878 - protein, 6 aa, ARTIFICIAL SEQUENCE
  Synthetic Construct
EKLYQK

SEQ ID NO: 10879 - protein, 6 aa, ARTIFICIAL SEQUENCE
  Synthetic Construct
EKLYRK

SEQ ID NO: 10880 - protein, 6 aa, ARTIFICIAL SEQUENCE
  Synthetic Construct
EKLYSK

SEQ ID NO: 10881 - protein, 6 aa, ARTIFICIAL SEQUENCE
  Synthetic Construct
EKLYTK

SEQ ID NO: 10882 - protein, 6 aa, ARTIFICIAL SEQUENCE
  Synthetic Construct
EKLYYK

SEQ ID NO: 10883 - protein, 6 aa, ARTIFICIAL SEQUENCE
  Synthetic Construct
EKNAAK

SEQ ID NO: 10884 - protein, 6 aa, ARTIFICIAL SEQUENCE
  Synthetic Construct
EKNADK

SEQ ID NO: 10885 - protein, 6 aa, ARTIFICIAL SEQUENCE
  Synthetic Construct
EKNAEK

SEQ ID NO: 10886 - protein, 6 aa, ARTIFICIAL SEQUENCE
  Synthetic Construct
EKNAFK

SEQ ID NO: 10887 - protein, 6 aa, ARTIFICIAL SEQUENCE
  Synthetic Construct
EKNAGK

SEQ ID NO: 10888 - protein, 6 aa, ARTIFICIAL SEQUENCE
  Synthetic Construct
EKNAHK

SEQ ID NO: 10889 - protein, 6 aa, ARTIFICIAL SEQUENCE
  Synthetic Construct
EKNAIK

SEQ ID NO: 10890 - protein, 6 aa, ARTIFICIAL SEQUENCE
  Synthetic Construct
EKNALK

SEQ ID NO: 10891 - protein, 6 aa, ARTIFICIAL SEQUENCE
  Synthetic Construct
EKNANK

SEQ ID NO: 10892 - protein, 6 aa, ARTIFICIAL SEQUENCE
  Synthetic Construct
EKNAQK

SEQ ID NO: 10893 - protein, 6 aa, ARTIFICIAL SEQUENCE
  Synthetic Construct
EKNARK

SEQ ID NO: 10894 - protein, 6 aa, ARTIFICIAL SEQUENCE
  Synthetic Construct
EKNASK

SEQ ID NO: 10895 - protein, 6 aa, ARTIFICIAL SEQUENCE
  Synthetic Construct
EKNATK

SEQ ID NO: 10896 - protein, 6 aa, ARTIFICIAL SEQUENCE
  Synthetic Construct
EKNAYK

SEQ ID NO: 10897 - protein, 6 aa, ARTIFICIAL SEQUENCE
  Synthetic Construct
EKNDAK

SEQ ID NO: 10898 - protein, 6 aa, ARTIFICIAL SEQUENCE
  Synthetic Construct
EKNDDK

SEQ ID NO: 10899 - protein, 6 aa, ARTIFICIAL SEQUENCE
  Synthetic Construct
EKNDEK

SEQ ID NO: 10900 - protein, 6 aa, ARTIFICIAL SEQUENCE
  Synthetic Construct
EKNDFK

SEQ ID NO: 10901 - protein, 6 aa, ARTIFICIAL SEQUENCE
  Synthetic Construct
EKNDGK

SEQ ID NO: 10902 - protein, 6 aa, ARTIFICIAL SEQUENCE
  Synthetic Construct
EKNDHK

SEQ ID NO: 10903 - protein, 6 aa, ARTIFICIAL SEQUENCE
  Synthetic Construct
EKNDIK

SEQ ID NO: 10904 - protein, 6 aa, ARTIFICIAL SEQUENCE
  Synthetic Construct
EKNDLK

SEQ ID NO: 10905 - protein, 6 aa, ARTIFICIAL SEQUENCE
  Synthetic Construct
EKNDNK

SEQ ID NO: 10906 - protein, 6 aa, ARTIFICIAL SEQUENCE
  Synthetic Construct
EKNDQK

SEQ ID NO: 10907 - protein, 6 aa, ARTIFICIAL SEQUENCE
  Synthetic Construct
EKNDRK

SEQ ID NO: 10908 - protein, 6 aa, ARTIFICIAL SEQUENCE
  Synthetic Construct
EKNDSK

SEQ ID NO: 10909 - protein, 6 aa, ARTIFICIAL SEQUENCE
  Synthetic Construct
EKNDTK

SEQ ID NO: 10910 - protein, 6 aa, ARTIFICIAL SEQUENCE
  Synthetic Construct
EKNDYK

SEQ ID NO: 10911 - protein, 6 aa, ARTIFICIAL SEQUENCE
  Synthetic Construct
EKNEAK

SEQ ID NO: 10912 - protein, 6 aa, ARTIFICIAL SEQUENCE
  Synthetic Construct
EKNEDK

SEQ ID NO: 10913 - protein, 6 aa, ARTIFICIAL SEQUENCE
  Synthetic Construct
EKNEEK

SEQ ID NO: 10914 - protein, 6 aa, ARTIFICIAL SEQUENCE
  Synthetic Construct
EKNEFK

SEQ ID NO: 10915 - protein, 6 aa, ARTIFICIAL SEQUENCE
  Synthetic Construct
EKNEGK

SEQ ID NO: 10916 - protein, 6 aa, ARTIFICIAL SEQUENCE
  Synthetic Construct
EKNEHK

SEQ ID NO: 10917 - protein, 6 aa, ARTIFICIAL SEQUENCE
  Synthetic Construct
EKNEIK

SEQ ID NO: 10918 - protein, 6 aa, ARTIFICIAL SEQUENCE
  Synthetic Construct
EKNELK

SEQ ID NO: 10919 - protein, 6 aa, ARTIFICIAL SEQUENCE
  Synthetic Construct
EKNENK

SEQ ID NO: 10920 - protein, 6 aa, ARTIFICIAL SEQUENCE
  Synthetic Construct
EKNEQK

SEQ ID NO: 10921 - protein, 6 aa, ARTIFICIAL SEQUENCE
  Synthetic Construct
EKNERK

SEQ ID NO: 10922 - protein, 6 aa, ARTIFICIAL SEQUENCE
  Synthetic Construct
EKNESK

SEQ ID NO: 10923 - protein, 6 aa, ARTIFICIAL SEQUENCE
  Synthetic Construct
EKNETK

SEQ ID NO: 10924 - protein, 6 aa, ARTIFICIAL SEQUENCE
  Synthetic Construct
EKNEYK

SEQ ID NO: 10925 - protein, 6 aa, ARTIFICIAL SEQUENCE
  Synthetic Construct
EKNFAK

SEQ ID NO: 10926 - protein, 6 aa, ARTIFICIAL SEQUENCE
  Synthetic Construct
EKNFDK

SEQ ID NO: 10927 - protein, 6 aa, ARTIFICIAL SEQUENCE
  Synthetic Construct
EKNFEK

SEQ ID NO: 10928 - protein, 6 aa, ARTIFICIAL SEQUENCE
  Synthetic Construct
EKNFFK

SEQ ID NO: 10929 - protein, 6 aa, ARTIFICIAL SEQUENCE
  Synthetic Construct
EKNFGK

SEQ ID NO: 10930 - protein, 6 aa, ARTIFICIAL SEQUENCE
  Synthetic Construct
EKNFHK

SEQ ID NO: 10931 - protein, 6 aa, ARTIFICIAL SEQUENCE
  Synthetic Construct
EKNFIK

SEQ ID NO: 10932 - protein, 6 aa, ARTIFICIAL SEQUENCE
  Synthetic Construct
EKNFLK

SEQ ID NO: 10933 - protein, 6 aa, ARTIFICIAL SEQUENCE
  Synthetic Construct
EKNFNK

SEQ ID NO: 10934 - protein, 6 aa, ARTIFICIAL SEQUENCE
  Synthetic Construct
EKNFQK

SEQ ID NO: 10935 - protein, 6 aa, ARTIFICIAL SEQUENCE
  Synthetic Construct
EKNFRK

SEQ ID NO: 10936 - protein, 6 aa, ARTIFICIAL SEQUENCE
  Synthetic Construct
EKNFSK

SEQ ID NO: 10937 - protein, 6 aa, ARTIFICIAL SEQUENCE
  Synthetic Construct
EKNFTK

SEQ ID NO: 10938 - protein, 6 aa, ARTIFICIAL SEQUENCE
  Synthetic Construct
EKNFYK

SEQ ID NO: 10939 - protein, 6 aa, ARTIFICIAL SEQUENCE
  Synthetic Construct
EKNGAK

SEQ ID NO: 10940 - protein, 6 aa, ARTIFICIAL SEQUENCE
  Synthetic Construct
EKNGDK

SEQ ID NO: 10941 - protein, 6 aa, ARTIFICIAL SEQUENCE
  Synthetic Construct
EKNGEK

SEQ ID NO: 10942 - protein, 6 aa, ARTIFICIAL SEQUENCE
  Synthetic Construct
EKNGFK

SEQ ID NO: 10943 - protein, 6 aa, ARTIFICIAL SEQUENCE
  Synthetic Construct
EKNGGK

SEQ ID NO: 10944 - protein, 6 aa, ARTIFICIAL SEQUENCE
  Synthetic Construct
EKNGHK

SEQ ID NO: 10945 - protein, 6 aa, ARTIFICIAL SEQUENCE
  Synthetic Construct
EKNGIK

SEQ ID NO: 10946 - protein, 6 aa, ARTIFICIAL SEQUENCE
  Synthetic Construct
EKNGLK

SEQ ID NO: 10947 - protein, 6 aa, ARTIFICIAL SEQUENCE
  Synthetic Construct
EKNGNK

SEQ ID NO: 10948 - protein, 6 aa, ARTIFICIAL SEQUENCE
  Synthetic Construct
EKNGQK

SEQ ID NO: 10949 - protein, 6 aa, ARTIFICIAL SEQUENCE
  Synthetic Construct
EKNGRK

SEQ ID NO: 10950 - protein, 6 aa, ARTIFICIAL SEQUENCE
  Synthetic Construct
EKNGSK

SEQ ID NO: 10951 - protein, 6 aa, ARTIFICIAL SEQUENCE
  Synthetic Construct
EKNGTK

SEQ ID NO: 10952 - protein, 6 aa, ARTIFICIAL SEQUENCE
  Synthetic Construct
EKNGYK

SEQ ID NO: 10953 - protein, 6 aa, ARTIFICIAL SEQUENCE
  Synthetic Construct
EKNHAK

SEQ ID NO: 10954 - protein, 6 aa, ARTIFICIAL SEQUENCE
  Synthetic Construct
EKNHDK

SEQ ID NO: 10955 - protein, 6 aa, ARTIFICIAL SEQUENCE
  Synthetic Construct
EKNHEK

SEQ ID NO: 10956 - protein, 6 aa, ARTIFICIAL SEQUENCE
  Synthetic Construct
EKNHFK

SEQ ID NO: 10957 - protein, 6 aa, ARTIFICIAL SEQUENCE
  Synthetic Construct
EKNHGK

SEQ ID NO: 10958 - protein, 6 aa, ARTIFICIAL SEQUENCE
  Synthetic Construct
EKNHHK

SEQ ID NO: 10959 - protein, 6 aa, ARTIFICIAL SEQUENCE
  Synthetic Construct
EKNHIK

SEQ ID NO: 10960 - protein, 6 aa, ARTIFICIAL SEQUENCE
  Synthetic Construct
EKNHLK

SEQ ID NO: 10961 - protein, 6 aa, ARTIFICIAL SEQUENCE
  Synthetic Construct
EKNHNK

SEQ ID NO: 10962 - protein, 6 aa, ARTIFICIAL SEQUENCE
  Synthetic Construct
EKNHQK

SEQ ID NO: 10963 - protein, 6 aa, ARTIFICIAL SEQUENCE
  Synthetic Construct
EKNHRK

SEQ ID NO: 10964 - protein, 6 aa, ARTIFICIAL SEQUENCE
  Synthetic Construct
EKNHSK

SEQ ID NO: 10965 - protein, 6 aa, ARTIFICIAL SEQUENCE
  Synthetic Construct
EKNHTK

SEQ ID NO: 10966 - protein, 6 aa, ARTIFICIAL SEQUENCE
  Synthetic Construct
EKNHYK

SEQ ID NO: 10967 - protein, 6 aa, ARTIFICIAL SEQUENCE
  Synthetic Construct
EKNIAK

SEQ ID NO: 10968 - protein, 6 aa, ARTIFICIAL SEQUENCE
  Synthetic Construct
EKNIDK

SEQ ID NO: 10969 - protein, 6 aa, ARTIFICIAL SEQUENCE
  Synthetic Construct
EKNIEK

SEQ ID NO: 10970 - protein, 6 aa, ARTIFICIAL SEQUENCE
  Synthetic Construct
EKNIFK

SEQ ID NO: 10971 - protein, 6 aa, ARTIFICIAL SEQUENCE
  Synthetic Construct
EKNIGK

SEQ ID NO: 10972 - protein, 6 aa, ARTIFICIAL SEQUENCE
  Synthetic Construct
EKNIHK

SEQ ID NO: 10973 - protein, 6 aa, ARTIFICIAL SEQUENCE
  Synthetic Construct
EKNIIK

SEQ ID NO: 10974 - protein, 6 aa, ARTIFICIAL SEQUENCE
  Synthetic Construct
EKNILK

SEQ ID NO: 10975 - protein, 6 aa, ARTIFICIAL SEQUENCE
  Synthetic Construct
EKNINK

SEQ ID NO: 10976 - protein, 6 aa, ARTIFICIAL SEQUENCE
  Synthetic Construct
EKNIQK

SEQ ID NO: 10977 - protein, 6 aa, ARTIFICIAL SEQUENCE
  Synthetic Construct
EKNIRK

SEQ ID NO: 10978 - protein, 6 aa, ARTIFICIAL SEQUENCE
  Synthetic Construct
EKNISK

SEQ ID NO: 10979 - protein, 6 aa, ARTIFICIAL SEQUENCE
  Synthetic Construct
EKNITK

SEQ ID NO: 10980 - protein, 6 aa, ARTIFICIAL SEQUENCE
  Synthetic Construct
EKNIYK

SEQ ID NO: 10981 - protein, 6 aa, ARTIFICIAL SEQUENCE
  Synthetic Construct
EKNLAK

SEQ ID NO: 10982 - protein, 6 aa, ARTIFICIAL SEQUENCE
  Synthetic Construct
EKNLDK

SEQ ID NO: 10983 - protein, 6 aa, ARTIFICIAL SEQUENCE
  Synthetic Construct
EKNLEK

SEQ ID NO: 10984 - protein, 6 aa, ARTIFICIAL SEQUENCE
  Synthetic Construct
EKNLFK

SEQ ID NO: 10985 - protein, 6 aa, ARTIFICIAL SEQUENCE
  Synthetic Construct
EKNLGK

SEQ ID NO: 10986 - protein, 6 aa, ARTIFICIAL SEQUENCE
  Synthetic Construct
EKNLHK

SEQ ID NO: 10987 - protein, 6 aa, ARTIFICIAL SEQUENCE
  Synthetic Construct
EKNLIK

SEQ ID NO: 10988 - protein, 6 aa, ARTIFICIAL SEQUENCE
  Synthetic Construct
EKNLLK

SEQ ID NO: 10989 - protein, 6 aa, ARTIFICIAL SEQUENCE
  Synthetic Construct
EKNLNK

SEQ ID NO: 10990 - protein, 6 aa, ARTIFICIAL SEQUENCE
  Synthetic Construct
EKNLQK

SEQ ID NO: 10991 - protein, 6 aa, ARTIFICIAL SEQUENCE
  Synthetic Construct
EKNLRK

SEQ ID NO: 10992 - protein, 6 aa, ARTIFICIAL SEQUENCE
  Synthetic Construct
EKNLSK

SEQ ID NO: 10993 - protein, 6 aa, ARTIFICIAL SEQUENCE
  Synthetic Construct
EKNLTK

SEQ ID NO: 10994 - protein, 6 aa, ARTIFICIAL SEQUENCE
  Synthetic Construct
EKNLYK

SEQ ID NO: 10995 - protein, 6 aa, ARTIFICIAL SEQUENCE
  Synthetic Construct
EKNNAK

SEQ ID NO: 10996 - protein, 6 aa, ARTIFICIAL SEQUENCE
  Synthetic Construct
EKNNDK

SEQ ID NO: 10997 - protein, 6 aa, ARTIFICIAL SEQUENCE
  Synthetic Construct
EKNNEK

SEQ ID NO: 10998 - protein, 6 aa, ARTIFICIAL SEQUENCE
  Synthetic Construct
EKNNFK

SEQ ID NO: 10999 - protein, 6 aa, ARTIFICIAL SEQUENCE
  Synthetic Construct
EKNNGK

SEQ ID NO: 11000 - protein, 6 aa, ARTIFICIAL SEQUENCE
  Synthetic Construct
EKNNHK

SEQ ID NO: 11001 - protein, 6 aa, ARTIFICIAL SEQUENCE
  Synthetic Construct
EKNNIK

SEQ ID NO: 11002 - protein, 6 aa, ARTIFICIAL SEQUENCE
  Synthetic Construct
EKNNLK

SEQ ID NO: 11003 - protein, 6 aa, ARTIFICIAL SEQUENCE
  Synthetic Construct
EKNNNK

SEQ ID NO: 11004 - protein, 6 aa, ARTIFICIAL SEQUENCE
  Synthetic Construct
EKNNQK

SEQ ID NO: 11005 - protein, 6 aa, ARTIFICIAL SEQUENCE
  Synthetic Construct
EKNNRK

SEQ ID NO: 11006 - protein, 6 aa, ARTIFICIAL SEQUENCE
  Synthetic Construct
EKNNSK

SEQ ID NO: 11007 - protein, 6 aa, ARTIFICIAL SEQUENCE
  Synthetic Construct
EKNNTK

SEQ ID NO: 11008 - protein, 6 aa, ARTIFICIAL SEQUENCE
  Synthetic Construct
EKNNYK

SEQ ID NO: 11009 - protein, 6 aa, ARTIFICIAL SEQUENCE
  Synthetic Construct
EKNQAK

SEQ ID NO: 11010 - protein, 6 aa, ARTIFICIAL SEQUENCE
  Synthetic Construct
EKNQDK

SEQ ID NO: 11011 - protein, 6 aa, ARTIFICIAL SEQUENCE
  Synthetic Construct
EKNQEK

SEQ ID NO: 11012 - protein, 6 aa, ARTIFICIAL SEQUENCE
  Synthetic Construct
EKNQFK

SEQ ID NO: 11013 - protein, 6 aa, ARTIFICIAL SEQUENCE
  Synthetic Construct
EKNQGK

SEQ ID NO: 11014 - protein, 6 aa, ARTIFICIAL SEQUENCE
  Synthetic Construct
EKNQHK

SEQ ID NO: 11015 - protein, 6 aa, ARTIFICIAL SEQUENCE
  Synthetic Construct
EKNQIK

SEQ ID NO: 11016 - protein, 6 aa, ARTIFICIAL SEQUENCE
  Synthetic Construct
EKNQLK

SEQ ID NO: 11017 - protein, 6 aa, ARTIFICIAL SEQUENCE
  Synthetic Construct
EKNQNK

SEQ ID NO: 11018 - protein, 6 aa, ARTIFICIAL SEQUENCE
  Synthetic Construct
EKNQQK

SEQ ID NO: 11019 - protein, 6 aa, ARTIFICIAL SEQUENCE
  Synthetic Construct
EKNQRK

SEQ ID NO: 11020 - protein, 6 aa, ARTIFICIAL SEQUENCE
  Synthetic Construct
EKNQSK

SEQ ID NO: 11021 - protein, 6 aa, ARTIFICIAL SEQUENCE
  Synthetic Construct
EKNQTK

SEQ ID NO: 11022 - protein, 6 aa, ARTIFICIAL SEQUENCE
  Synthetic Construct
EKNQYK

SEQ ID NO: 11023 - protein, 6 aa, ARTIFICIAL SEQUENCE
  Synthetic Construct
EKNRAK

SEQ ID NO: 11024 - protein, 6 aa, ARTIFICIAL SEQUENCE
  Synthetic Construct
EKNRDK

SEQ ID NO: 11025 - protein, 6 aa, ARTIFICIAL SEQUENCE
  Synthetic Construct
EKNREK

SEQ ID NO: 11026 - protein, 6 aa, ARTIFICIAL SEQUENCE
  Synthetic Construct
EKNRFK

SEQ ID NO: 11027 - protein, 6 aa, ARTIFICIAL SEQUENCE
  Synthetic Construct
EKNRGK

SEQ ID NO: 11028 - protein, 6 aa, ARTIFICIAL SEQUENCE
  Synthetic Construct
EKNRHK

SEQ ID NO: 11029 - protein, 6 aa, ARTIFICIAL SEQUENCE
  Synthetic Construct
EKNRIK

SEQ ID NO: 11030 - protein, 6 aa, ARTIFICIAL SEQUENCE
  Synthetic Construct
EKNRLK

SEQ ID NO: 11031 - protein, 6 aa, ARTIFICIAL SEQUENCE
  Synthetic Construct
EKNRNK

SEQ ID NO: 11032 - protein, 6 aa, ARTIFICIAL SEQUENCE
  Synthetic Construct
EKNRQK

SEQ ID NO: 11033 - protein, 6 aa, ARTIFICIAL SEQUENCE
  Synthetic Construct
EKNRRK

SEQ ID NO: 11034 - protein, 6 aa, ARTIFICIAL SEQUENCE
  Synthetic Construct
EKNRSK

SEQ ID NO: 11035 - protein, 6 aa, ARTIFICIAL SEQUENCE
  Synthetic Construct
EKNRTK

SEQ ID NO: 11036 - protein, 6 aa, ARTIFICIAL SEQUENCE
  Synthetic Construct
EKNRYK

SEQ ID NO: 11037 - protein, 6 aa, ARTIFICIAL SEQUENCE
  Synthetic Construct
EKNSAK

SEQ ID NO: 11038 - protein, 6 aa, ARTIFICIAL SEQUENCE
  Synthetic Construct
EKNSDK

SEQ ID NO: 11039 - protein, 6 aa, ARTIFICIAL SEQUENCE
  Synthetic Construct
EKNSEK

SEQ ID NO: 11040 - protein, 6 aa, ARTIFICIAL SEQUENCE
  Synthetic Construct
EKNSFK

SEQ ID NO: 11041 - protein, 6 aa, ARTIFICIAL SEQUENCE
  Synthetic Construct
EKNSGK

SEQ ID NO: 11042 - protein, 6 aa, ARTIFICIAL SEQUENCE
  Synthetic Construct
EKNSHK

SEQ ID NO: 11043 - protein, 6 aa, ARTIFICIAL SEQUENCE
  Synthetic Construct
EKNSIK

SEQ ID NO: 11044 - protein, 6 aa, ARTIFICIAL SEQUENCE
  Synthetic Construct
EKNSLK

SEQ ID NO: 11045 - protein, 6 aa, ARTIFICIAL SEQUENCE
  Synthetic Construct
EKNSNK

SEQ ID NO: 11046 - protein, 6 aa, ARTIFICIAL SEQUENCE
  Synthetic Construct
EKNSQK

SEQ ID NO: 11047 - protein, 6 aa, ARTIFICIAL SEQUENCE
  Synthetic Construct
EKNSRK

SEQ ID NO: 11048 - protein, 6 aa, ARTIFICIAL SEQUENCE
  Synthetic Construct
EKNSSK

SEQ ID NO: 11049 - protein, 6 aa, ARTIFICIAL SEQUENCE
  Synthetic Construct
EKNSTK

SEQ ID NO: 11050 - protein, 6 aa, ARTIFICIAL SEQUENCE
  Synthetic Construct
EKNSYK

SEQ ID NO: 11051 - protein, 6 aa, ARTIFICIAL SEQUENCE
  Synthetic Construct
EKNTAK

SEQ ID NO: 11052 - protein, 6 aa, ARTIFICIAL SEQUENCE
  Synthetic Construct
EKNTDK

SEQ ID NO: 11053 - protein, 6 aa, ARTIFICIAL SEQUENCE
  Synthetic Construct
EKNTEK

SEQ ID NO: 11054 - protein, 6 aa, ARTIFICIAL SEQUENCE
  Synthetic Construct
EKNTFK

SEQ ID NO: 11055 - protein, 6 aa, ARTIFICIAL SEQUENCE
  Synthetic Construct
EKNTGK

SEQ ID NO: 11056 - protein, 6 aa, ARTIFICIAL SEQUENCE
  Synthetic Construct
EKNTHK

SEQ ID NO: 11057 - protein, 6 aa, ARTIFICIAL SEQUENCE
  Synthetic Construct
EKNTIK

SEQ ID NO: 11058 - protein, 6 aa, ARTIFICIAL SEQUENCE
  Synthetic Construct
EKNTLK

SEQ ID NO: 11059 - protein, 6 aa, ARTIFICIAL SEQUENCE
  Synthetic Construct
EKNTNK

SEQ ID NO: 11060 - protein, 6 aa, ARTIFICIAL SEQUENCE
  Synthetic Construct
EKNTQK

SEQ ID NO: 11061 - protein, 6 aa, ARTIFICIAL SEQUENCE
  Synthetic Construct
EKNTRK

SEQ ID NO: 11062 - protein, 6 aa, ARTIFICIAL SEQUENCE
  Synthetic Construct
EKNTSK

SEQ ID NO: 11063 - protein, 6 aa, ARTIFICIAL SEQUENCE
  Synthetic Construct
EKNTTK

SEQ ID NO: 11064 - protein, 6 aa, ARTIFICIAL SEQUENCE
  Synthetic Construct
EKNTYK

SEQ ID NO: 11065 - protein, 6 aa, ARTIFICIAL SEQUENCE
  Synthetic Construct
EKNYAK

SEQ ID NO: 11066 - protein, 6 aa, ARTIFICIAL SEQUENCE
  Synthetic Construct
EKNYDK

SEQ ID NO: 11067 - protein, 6 aa, ARTIFICIAL SEQUENCE
  Synthetic Construct
EKNYEK

SEQ ID NO: 11068 - protein, 6 aa, ARTIFICIAL SEQUENCE
  Synthetic Construct
EKNYFK

SEQ ID NO: 11069 - protein, 6 aa, ARTIFICIAL SEQUENCE
  Synthetic Construct
EKNYGK

SEQ ID NO: 11070 - protein, 6 aa, ARTIFICIAL SEQUENCE
  Synthetic Construct
EKNYHK

SEQ ID NO: 11071 - protein, 6 aa, ARTIFICIAL SEQUENCE
  Synthetic Construct
EKNYIK

SEQ ID NO: 11072 - protein, 6 aa, ARTIFICIAL SEQUENCE
  Synthetic Construct
EKNYLK

SEQ ID NO: 11073 - protein, 6 aa, ARTIFICIAL SEQUENCE
  Synthetic Construct
EKNYNK

SEQ ID NO: 11074 - protein, 6 aa, ARTIFICIAL SEQUENCE
  Synthetic Construct
EKNYQK

SEQ ID NO: 11075 - protein, 6 aa, ARTIFICIAL SEQUENCE
  Synthetic Construct
EKNYRK

SEQ ID NO: 11076 - protein, 6 aa, ARTIFICIAL SEQUENCE
  Synthetic Construct
EKNYSK

SEQ ID NO: 11077 - protein, 6 aa, ARTIFICIAL SEQUENCE
  Synthetic Construct
EKNYTK

SEQ ID NO: 11078 - protein, 6 aa, ARTIFICIAL SEQUENCE
  Synthetic Construct
EKNYYK

SEQ ID NO: 11079 - protein, 6 aa, ARTIFICIAL SEQUENCE
  Synthetic Construct
EKPAAK

SEQ ID NO: 11080 - protein, 6 aa, ARTIFICIAL SEQUENCE
  Synthetic Construct
EKPADK

SEQ ID NO: 11081 - protein, 6 aa, ARTIFICIAL SEQUENCE
  Synthetic Construct
EKPAEK

SEQ ID NO: 11082 - protein, 6 aa, ARTIFICIAL SEQUENCE
  Synthetic Construct
EKPAFK

SEQ ID NO: 11083 - protein, 6 aa, ARTIFICIAL SEQUENCE
  Synthetic Construct
EKPAGK

SEQ ID NO: 11084 - protein, 6 aa, ARTIFICIAL SEQUENCE
  Synthetic Construct
EKPAHK

SEQ ID NO: 11085 - protein, 6 aa, ARTIFICIAL SEQUENCE
  Synthetic Construct
EKPAIK

SEQ ID NO: 11086 - protein, 6 aa, ARTIFICIAL SEQUENCE
  Synthetic Construct
EKPALK

SEQ ID NO: 11087 - protein, 6 aa, ARTIFICIAL SEQUENCE
  Synthetic Construct
EKPANK

SEQ ID NO: 11088 - protein, 6 aa, ARTIFICIAL SEQUENCE
  Synthetic Construct
EKPAQK

SEQ ID NO: 11089 - protein, 6 aa, ARTIFICIAL SEQUENCE
  Synthetic Construct
EKPARK

SEQ ID NO: 11090 - protein, 6 aa, ARTIFICIAL SEQUENCE
  Synthetic Construct
EKPASK

SEQ ID NO: 11091 - protein, 6 aa, ARTIFICIAL SEQUENCE
  Synthetic Construct
EKPATK

SEQ ID NO: 11092 - protein, 6 aa, ARTIFICIAL SEQUENCE
  Synthetic Construct
EKPAYK

SEQ ID NO: 11093 - protein, 6 aa, ARTIFICIAL SEQUENCE
  Synthetic Construct
EKPDAK

SEQ ID NO: 11094 - protein, 6 aa, ARTIFICIAL SEQUENCE
  Synthetic Construct
EKPDDK

SEQ ID NO: 11095 - protein, 6 aa, ARTIFICIAL SEQUENCE
  Synthetic Construct
EKPDEK

SEQ ID NO: 11096 - protein, 6 aa, ARTIFICIAL SEQUENCE
  Synthetic Construct
EKPDFK

SEQ ID NO: 11097 - protein, 6 aa, ARTIFICIAL SEQUENCE
  Synthetic Construct
EKPDGK

SEQ ID NO: 11098 - protein, 6 aa, ARTIFICIAL SEQUENCE
  Synthetic Construct
EKPDHK

SEQ ID NO: 11099 - protein, 6 aa, ARTIFICIAL SEQUENCE
  Synthetic Construct
EKPDIK

SEQ ID NO: 11100 - protein, 6 aa, ARTIFICIAL SEQUENCE
  Synthetic Construct
EKPDLK

SEQ ID NO: 11101 - protein, 6 aa, ARTIFICIAL SEQUENCE
  Synthetic Construct
EKPDNK

SEQ ID NO: 11102 - protein, 6 aa, ARTIFICIAL SEQUENCE
  Synthetic Construct
EKPDQK

SEQ ID NO: 11103 - protein, 6 aa, ARTIFICIAL SEQUENCE
  Synthetic Construct
EKPDRK

SEQ ID NO: 11104 - protein, 6 aa, ARTIFICIAL SEQUENCE
  Synthetic Construct
EKPDSK

SEQ ID NO: 11105 - protein, 6 aa, ARTIFICIAL SEQUENCE
  Synthetic Construct
EKPDTK

SEQ ID NO: 11106 - protein, 6 aa, ARTIFICIAL SEQUENCE
  Synthetic Construct
EKPDYK

SEQ ID NO: 11107 - protein, 6 aa, ARTIFICIAL SEQUENCE
  Synthetic Construct
EKPEAK

SEQ ID NO: 11108 - protein, 6 aa, ARTIFICIAL SEQUENCE
  Synthetic Construct
EKPEDK

SEQ ID NO: 11109 - protein, 6 aa, ARTIFICIAL SEQUENCE
  Synthetic Construct
EKPEEK

SEQ ID NO: 11110 - protein, 6 aa, ARTIFICIAL SEQUENCE
  Synthetic Construct
EKPEFK

SEQ ID NO: 11111 - protein, 6 aa, ARTIFICIAL SEQUENCE
  Synthetic Construct
EKPEGK

SEQ ID NO: 11112 - protein, 6 aa, ARTIFICIAL SEQUENCE
  Synthetic Construct
EKPEHK

SEQ ID NO: 11113 - protein, 6 aa, ARTIFICIAL SEQUENCE
  Synthetic Construct
EKPEIK

SEQ ID NO: 11114 - protein, 6 aa, ARTIFICIAL SEQUENCE
  Synthetic Construct
EKPELK

SEQ ID NO: 11115 - protein, 6 aa, ARTIFICIAL SEQUENCE
  Synthetic Construct
EKPENK

SEQ ID NO: 11116 - protein, 6 aa, ARTIFICIAL SEQUENCE
  Synthetic Construct
EKPEQK

SEQ ID NO: 11117 - protein, 6 aa, ARTIFICIAL SEQUENCE
  Synthetic Construct
EKPERK

SEQ ID NO: 11118 - protein, 6 aa, ARTIFICIAL SEQUENCE
  Synthetic Construct
EKPESK

SEQ ID NO: 11119 - protein, 6 aa, ARTIFICIAL SEQUENCE
  Synthetic Construct
EKPETK

SEQ ID NO: 11120 - protein, 6 aa, ARTIFICIAL SEQUENCE
  Synthetic Construct
EKPEYK

SEQ ID NO: 11121 - protein, 6 aa, ARTIFICIAL SEQUENCE
  Synthetic Construct
EKPFAK

SEQ ID NO: 11122 - protein, 6 aa, ARTIFICIAL SEQUENCE
  Synthetic Construct
EKPFDK

SEQ ID NO: 11123 - protein, 6 aa, ARTIFICIAL SEQUENCE
  Synthetic Construct
EKPFEK

SEQ ID NO: 11124 - protein, 6 aa, ARTIFICIAL SEQUENCE
  Synthetic Construct
EKPFFK

SEQ ID NO: 11125 - protein, 6 aa, ARTIFICIAL SEQUENCE
  Synthetic Construct
EKPFGK

SEQ ID NO: 11126 - protein, 6 aa, ARTIFICIAL SEQUENCE
  Synthetic Construct
EKPFHK

SEQ ID NO: 11127 - protein, 6 aa, ARTIFICIAL SEQUENCE
  Synthetic Construct
EKPFIK

SEQ ID NO: 11128 - protein, 6 aa, ARTIFICIAL SEQUENCE
  Synthetic Construct
EKPFLK

SEQ ID NO: 11129 - protein, 6 aa, ARTIFICIAL SEQUENCE
  Synthetic Construct
EKPFNK

SEQ ID NO: 11130 - protein, 6 aa, ARTIFICIAL SEQUENCE
  Synthetic Construct
EKPFQK

SEQ ID NO: 11131 - protein, 6 aa, ARTIFICIAL SEQUENCE
  Synthetic Construct
EKPFRK

SEQ ID NO: 11132 - protein, 6 aa, ARTIFICIAL SEQUENCE
  Synthetic Construct
EKPFSK

SEQ ID NO: 11133 - protein, 6 aa, ARTIFICIAL SEQUENCE
  Synthetic Construct
EKPFTK

SEQ ID NO: 11134 - protein, 6 aa, ARTIFICIAL SEQUENCE
  Synthetic Construct
EKPFYK

SEQ ID NO: 11135 - protein, 6 aa, ARTIFICIAL SEQUENCE
  Synthetic Construct
EKPGAK

SEQ ID NO: 11136 - protein, 6 aa, ARTIFICIAL SEQUENCE
  Synthetic Construct
EKPGDK

SEQ ID NO: 11137 - protein, 6 aa, ARTIFICIAL SEQUENCE
  Synthetic Construct
EKPGEK

SEQ ID NO: 11138 - protein, 6 aa, ARTIFICIAL SEQUENCE
  Synthetic Construct
EKPGFK

SEQ ID NO: 11139 - protein, 6 aa, ARTIFICIAL SEQUENCE
  Synthetic Construct
EKPGGK

SEQ ID NO: 11140 - protein, 6 aa, ARTIFICIAL SEQUENCE
  Synthetic Construct
EKPGHK

SEQ ID NO: 11141 - protein, 6 aa, ARTIFICIAL SEQUENCE
  Synthetic Construct
EKPGIK

SEQ ID NO: 11142 - protein, 6 aa, ARTIFICIAL SEQUENCE
  Synthetic Construct
EKPGLK

SEQ ID NO: 11143 - protein, 6 aa, ARTIFICIAL SEQUENCE
  Synthetic Construct
EKPGNK

SEQ ID NO: 11144 - protein, 6 aa, ARTIFICIAL SEQUENCE
  Synthetic Construct
EKPGQK

SEQ ID NO: 11145 - protein, 6 aa, ARTIFICIAL SEQUENCE
  Synthetic Construct
EKPGRK

SEQ ID NO: 11146 - protein, 6 aa, ARTIFICIAL SEQUENCE
  Synthetic Construct
EKPGSK

SEQ ID NO: 11147 - protein, 6 aa, ARTIFICIAL SEQUENCE
  Synthetic Construct
EKPGTK

SEQ ID NO: 11148 - protein, 6 aa, ARTIFICIAL SEQUENCE
  Synthetic Construct
EKPGYK

SEQ ID NO: 11149 - protein, 6 aa, ARTIFICIAL SEQUENCE
  Synthetic Construct
EKPHAK

SEQ ID NO: 11150 - protein, 6 aa, ARTIFICIAL SEQUENCE
  Synthetic Construct
EKPHDK

SEQ ID NO: 11151 - protein, 6 aa, ARTIFICIAL SEQUENCE
  Synthetic Construct
EKPHEK

SEQ ID NO: 11152 - protein, 6 aa, ARTIFICIAL SEQUENCE
  Synthetic Construct
EKPHFK

SEQ ID NO: 11153 - protein, 6 aa, ARTIFICIAL SEQUENCE
  Synthetic Construct
EKPHGK

SEQ ID NO: 11154 - protein, 6 aa, ARTIFICIAL SEQUENCE
  Synthetic Construct
EKPHHK

SEQ ID NO: 11155 - protein, 6 aa, ARTIFICIAL SEQUENCE
  Synthetic Construct
EKPHIK

SEQ ID NO: 11156 - protein, 6 aa, ARTIFICIAL SEQUENCE
  Synthetic Construct
EKPHLK

SEQ ID NO: 11157 - protein, 6 aa, ARTIFICIAL SEQUENCE
  Synthetic Construct
EKPHNK

SEQ ID NO: 11158 - protein, 6 aa, ARTIFICIAL SEQUENCE
  Synthetic Construct
EKPHQK

SEQ ID NO: 11159 - protein, 6 aa, ARTIFICIAL SEQUENCE
  Synthetic Construct
EKPHRK

SEQ ID NO: 11160 - protein, 6 aa, ARTIFICIAL SEQUENCE
  Synthetic Construct
EKPHSK

SEQ ID NO: 11161 - protein, 6 aa, ARTIFICIAL SEQUENCE
  Synthetic Construct
EKPHTK

SEQ ID NO: 11162 - protein, 6 aa, ARTIFICIAL SEQUENCE
  Synthetic Construct
EKPHYK

SEQ ID NO: 11163 - protein, 6 aa, ARTIFICIAL SEQUENCE
  Synthetic Construct
EKPIAK

SEQ ID NO: 11164 - protein, 6 aa, ARTIFICIAL SEQUENCE
  Synthetic Construct
EKPIDK

SEQ ID NO: 11165 - protein, 6 aa, ARTIFICIAL SEQUENCE
  Synthetic Construct
EKPIEK

SEQ ID NO: 11166 - protein, 6 aa, ARTIFICIAL SEQUENCE
  Synthetic Construct
EKPIFK

SEQ ID NO: 11167 - protein, 6 aa, ARTIFICIAL SEQUENCE
  Synthetic Construct
EKPIGK

SEQ ID NO: 11168 - protein, 6 aa, ARTIFICIAL SEQUENCE
  Synthetic Construct
EKPIHK

SEQ ID NO: 11169 - protein, 6 aa, ARTIFICIAL SEQUENCE
  Synthetic Construct
EKPIIK

SEQ ID NO: 11170 - protein, 6 aa, ARTIFICIAL SEQUENCE
  Synthetic Construct
EKPILK

SEQ ID NO: 11171 - protein, 6 aa, ARTIFICIAL SEQUENCE
  Synthetic Construct
EKPINK

SEQ ID NO: 11172 - protein, 6 aa, ARTIFICIAL SEQUENCE
  Synthetic Construct
EKPIQK

SEQ ID NO: 11173 - protein, 6 aa, ARTIFICIAL SEQUENCE
  Synthetic Construct
EKPIRK

SEQ ID NO: 11174 - protein, 6 aa, ARTIFICIAL SEQUENCE
  Synthetic Construct
EKPISK

SEQ ID NO: 11175 - protein, 6 aa, ARTIFICIAL SEQUENCE
  Synthetic Construct
EKPITK

SEQ ID NO: 11176 - protein, 6 aa, ARTIFICIAL SEQUENCE
  Synthetic Construct
EKPIYK

SEQ ID NO: 11177 - protein, 6 aa, ARTIFICIAL SEQUENCE
  Synthetic Construct
EKPLAK

SEQ ID NO: 11178 - protein, 6 aa, ARTIFICIAL SEQUENCE
  Synthetic Construct
EKPLDK

SEQ ID NO: 11179 - protein, 6 aa, ARTIFICIAL SEQUENCE
  Synthetic Construct
EKPLEK

SEQ ID NO: 11180 - protein, 6 aa, ARTIFICIAL SEQUENCE
  Synthetic Construct
EKPLFK

SEQ ID NO: 11181 - protein, 6 aa, ARTIFICIAL SEQUENCE
  Synthetic Construct
EKPLGK

SEQ ID NO: 11182 - protein, 6 aa, ARTIFICIAL SEQUENCE
  Synthetic Construct
EKPLHK

SEQ ID NO: 11183 - protein, 6 aa, ARTIFICIAL SEQUENCE
  Synthetic Construct
EKPLIK

SEQ ID NO: 11184 - protein, 6 aa, ARTIFICIAL SEQUENCE
  Synthetic Construct
EKPLLK

SEQ ID NO: 11185 - protein, 6 aa, ARTIFICIAL SEQUENCE
  Synthetic Construct
EKPLNK

SEQ ID NO: 11186 - protein, 6 aa, ARTIFICIAL SEQUENCE
  Synthetic Construct
EKPLQK

SEQ ID NO: 11187 - protein, 6 aa, ARTIFICIAL SEQUENCE
  Synthetic Construct
EKPLRK

SEQ ID NO: 11188 - protein, 6 aa, ARTIFICIAL SEQUENCE
  Synthetic Construct
EKPLSK

SEQ ID NO: 11189 - protein, 6 aa, ARTIFICIAL SEQUENCE
  Synthetic Construct
EKPLTK

SEQ ID NO: 11190 - protein, 6 aa, ARTIFICIAL SEQUENCE
  Synthetic Construct
EKPLYK

SEQ ID NO: 11191 - protein, 6 aa, ARTIFICIAL SEQUENCE
  Synthetic Construct
EKPNAK

SEQ ID NO: 11192 - protein, 6 aa, ARTIFICIAL SEQUENCE
  Synthetic Construct
EKPNDK

SEQ ID NO: 11193 - protein, 6 aa, ARTIFICIAL SEQUENCE
  Synthetic Construct
EKPNEK

SEQ ID NO: 11194 - protein, 6 aa, ARTIFICIAL SEQUENCE
  Synthetic Construct
EKPNFK

SEQ ID NO: 11195 - protein, 6 aa, ARTIFICIAL SEQUENCE
  Synthetic Construct
EKPNGK

SEQ ID NO: 11196 - protein, 6 aa, ARTIFICIAL SEQUENCE
  Synthetic Construct
EKPNHK

SEQ ID NO: 11197 - protein, 6 aa, ARTIFICIAL SEQUENCE
  Synthetic Construct
EKPNIK

SEQ ID NO: 11198 - protein, 6 aa, ARTIFICIAL SEQUENCE
  Synthetic Construct
EKPNLK

SEQ ID NO: 11199 - protein, 6 aa, ARTIFICIAL SEQUENCE
  Synthetic Construct
EKPNNK

SEQ ID NO: 11200 - protein, 6 aa, ARTIFICIAL SEQUENCE
  Synthetic Construct
EKPNQK

SEQ ID NO: 11201 - protein, 6 aa, ARTIFICIAL SEQUENCE
  Synthetic Construct
EKPNRK

SEQ ID NO: 11202 - protein, 6 aa, ARTIFICIAL SEQUENCE
  Synthetic Construct
EKPNSK

SEQ ID NO: 11203 - protein, 6 aa, ARTIFICIAL SEQUENCE
  Synthetic Construct
EKPNTK

SEQ ID NO: 11204 - protein, 6 aa, ARTIFICIAL SEQUENCE
  Synthetic Construct
EKPNYK

SEQ ID NO: 11205 - protein, 6 aa, ARTIFICIAL SEQUENCE
  Synthetic Construct
EKPQAK

SEQ ID NO: 11206 - protein, 6 aa, ARTIFICIAL SEQUENCE
  Synthetic Construct
EKPQDK

SEQ ID NO: 11207 - protein, 6 aa, ARTIFICIAL SEQUENCE
  Synthetic Construct
EKPQEK

SEQ ID NO: 11208 - protein, 6 aa, ARTIFICIAL SEQUENCE
  Synthetic Construct
EKPQFK

SEQ ID NO: 11209 - protein, 6 aa, ARTIFICIAL SEQUENCE
  Synthetic Construct
EKPQGK

SEQ ID NO: 11210 - protein, 6 aa, ARTIFICIAL SEQUENCE
  Synthetic Construct
EKPQHK

SEQ ID NO: 11211 - protein, 6 aa, ARTIFICIAL SEQUENCE
  Synthetic Construct
EKPQIK

SEQ ID NO: 11212 - protein, 6 aa, ARTIFICIAL SEQUENCE
  Synthetic Construct
EKPQLK

SEQ ID NO: 11213 - protein, 6 aa, ARTIFICIAL SEQUENCE
  Synthetic Construct
EKPQNK

SEQ ID NO: 11214 - protein, 6 aa, ARTIFICIAL SEQUENCE
  Synthetic Construct
EKPQQK

SEQ ID NO: 11215 - protein, 6 aa, ARTIFICIAL SEQUENCE
  Synthetic Construct
EKPQRK

SEQ ID NO: 11216 - protein, 6 aa, ARTIFICIAL SEQUENCE
  Synthetic Construct
EKPQSK

SEQ ID NO: 11217 - protein, 6 aa, ARTIFICIAL SEQUENCE
  Synthetic Construct
EKPQTK

SEQ ID NO: 11218 - protein, 6 aa, ARTIFICIAL SEQUENCE
  Synthetic Construct
EKPQYK

SEQ ID NO: 11219 - protein, 6 aa, ARTIFICIAL SEQUENCE
  Synthetic Construct
EKPRAK

SEQ ID NO: 11220 - protein, 6 aa, ARTIFICIAL SEQUENCE
  Synthetic Construct
EKPRDK

SEQ ID NO: 11221 - protein, 6 aa, ARTIFICIAL SEQUENCE
  Synthetic Construct
EKPREK

SEQ ID NO: 11222 - protein, 6 aa, ARTIFICIAL SEQUENCE
  Synthetic Construct
EKPRFK

SEQ ID NO: 11223 - protein, 6 aa, ARTIFICIAL SEQUENCE
  Synthetic Construct
EKPRGK

SEQ ID NO: 11224 - protein, 6 aa, ARTIFICIAL SEQUENCE
  Synthetic Construct
EKPRHK

SEQ ID NO: 11225 - protein, 6 aa, ARTIFICIAL SEQUENCE
  Synthetic Construct
EKPRIK

SEQ ID NO: 11226 - protein, 6 aa, ARTIFICIAL SEQUENCE
  Synthetic Construct
EKPRLK

SEQ ID NO: 11227 - protein, 6 aa, ARTIFICIAL SEQUENCE
  Synthetic Construct
EKPRNK

SEQ ID NO: 11228 - protein, 6 aa, ARTIFICIAL SEQUENCE
  Synthetic Construct
EKPRQK

SEQ ID NO: 11229 - protein, 6 aa, ARTIFICIAL SEQUENCE
  Synthetic Construct
EKPRRK

SEQ ID NO: 11230 - protein, 6 aa, ARTIFICIAL SEQUENCE
  Synthetic Construct
EKPRSK

SEQ ID NO: 11231 - protein, 6 aa, ARTIFICIAL SEQUENCE
  Synthetic Construct
EKPRTK

SEQ ID NO: 11232 - protein, 6 aa, ARTIFICIAL SEQUENCE
  Synthetic Construct
EKPRYK

SEQ ID NO: 11233 - protein, 6 aa, ARTIFICIAL SEQUENCE
  Synthetic Construct
EKPSAK

SEQ ID NO: 11234 - protein, 6 aa, ARTIFICIAL SEQUENCE
  Synthetic Construct
EKPSDK

SEQ ID NO: 11235 - protein, 6 aa, ARTIFICIAL SEQUENCE
  Synthetic Construct
EKPSEK

SEQ ID NO: 11236 - protein, 6 aa, ARTIFICIAL SEQUENCE
  Synthetic Construct
EKPSFK

SEQ ID NO: 11237 - protein, 6 aa, ARTIFICIAL SEQUENCE
  Synthetic Construct
EKPSGK

SEQ ID NO: 11238 - protein, 6 aa, ARTIFICIAL SEQUENCE
  Synthetic Construct
EKPSHK

SEQ ID NO: 11239 - protein, 6 aa, ARTIFICIAL SEQUENCE
  Synthetic Construct
EKPSIK

SEQ ID NO: 11240 - protein, 6 aa, ARTIFICIAL SEQUENCE
  Synthetic Construct
EKPSLK

SEQ ID NO: 11241 - protein, 6 aa, ARTIFICIAL SEQUENCE
  Synthetic Construct
EKPSNK

SEQ ID NO: 11242 - protein, 6 aa, ARTIFICIAL SEQUENCE
  Synthetic Construct
EKPSQK

SEQ ID NO: 11243 - protein, 6 aa, ARTIFICIAL SEQUENCE
  Synthetic Construct
EKPSRK

SEQ ID NO: 11244 - protein, 6 aa, ARTIFICIAL SEQUENCE
  Synthetic Construct
EKPSSK

SEQ ID NO: 11245 - protein, 6 aa, ARTIFICIAL SEQUENCE
  Synthetic Construct
EKPSTK

SEQ ID NO: 11246 - protein, 6 aa, ARTIFICIAL SEQUENCE
  Synthetic Construct
EKPSYK

SEQ ID NO: 11247 - protein, 6 aa, ARTIFICIAL SEQUENCE
  Synthetic Construct
EKPTAK

SEQ ID NO: 11248 - protein, 6 aa, ARTIFICIAL SEQUENCE
  Synthetic Construct
EKPTDK

SEQ ID NO: 11249 - protein, 6 aa, ARTIFICIAL SEQUENCE
  Synthetic Construct
EKPTEK

SEQ ID NO: 11250 - protein, 6 aa, ARTIFICIAL SEQUENCE
  Synthetic Construct
EKPTFK

SEQ ID NO: 11251 - protein, 6 aa, ARTIFICIAL SEQUENCE
  Synthetic Construct
EKPTGK

SEQ ID NO: 11252 - protein, 6 aa, ARTIFICIAL SEQUENCE
  Synthetic Construct
EKPTHK

SEQ ID NO: 11253 - protein, 6 aa, ARTIFICIAL SEQUENCE
  Synthetic Construct
EKPTIK

SEQ ID NO: 11254 - protein, 6 aa, ARTIFICIAL SEQUENCE
  Synthetic Construct
EKPTLK

SEQ ID NO: 11255 - protein, 6 aa, ARTIFICIAL SEQUENCE
  Synthetic Construct
EKPTNK

SEQ ID NO: 11256 - protein, 6 aa, ARTIFICIAL SEQUENCE
  Synthetic Construct
EKPTQK

SEQ ID NO: 11257 - protein, 6 aa, ARTIFICIAL SEQUENCE
  Synthetic Construct
EKPTRK

SEQ ID NO: 11258 - protein, 6 aa, ARTIFICIAL SEQUENCE
  Synthetic Construct
EKPTSK

SEQ ID NO: 11259 - protein, 6 aa, ARTIFICIAL SEQUENCE
  Synthetic Construct
EKPTTK

SEQ ID NO: 11260 - protein, 6 aa, ARTIFICIAL SEQUENCE
  Synthetic Construct
EKPTYK

SEQ ID NO: 11261 - protein, 6 aa, ARTIFICIAL SEQUENCE
  Synthetic Construct
EKPYAK

SEQ ID NO: 11262 - protein, 6 aa, ARTIFICIAL SEQUENCE
  Synthetic Construct
EKPYDK

SEQ ID NO: 11263 - protein, 6 aa, ARTIFICIAL SEQUENCE
  Synthetic Construct
EKPYEK

SEQ ID NO: 11264 - protein, 6 aa, ARTIFICIAL SEQUENCE
  Synthetic Construct
EKPYFK

SEQ ID NO: 11265 - protein, 6 aa, ARTIFICIAL SEQUENCE
  Synthetic Construct
EKPYGK

SEQ ID NO: 11266 - protein, 6 aa, ARTIFICIAL SEQUENCE
  Synthetic Construct
EKPYHK

SEQ ID NO: 11267 - protein, 6 aa, ARTIFICIAL SEQUENCE
  Synthetic Construct
EKPYIK

SEQ ID NO: 11268 - protein, 6 aa, ARTIFICIAL SEQUENCE
  Synthetic Construct
EKPYLK

SEQ ID NO: 11269 - protein, 6 aa, ARTIFICIAL SEQUENCE
  Synthetic Construct
EKPYNK

SEQ ID NO: 11270 - protein, 6 aa, ARTIFICIAL SEQUENCE
  Synthetic Construct
EKPYQK

SEQ ID NO: 11271 - protein, 6 aa, ARTIFICIAL SEQUENCE
  Synthetic Construct
EKPYRK

SEQ ID NO: 11272 - protein, 6 aa, ARTIFICIAL SEQUENCE
  Synthetic Construct
EKPYSK

SEQ ID NO: 11273 - protein, 6 aa, ARTIFICIAL SEQUENCE
  Synthetic Construct
EKPYTK

SEQ ID NO: 11274 - protein, 6 aa, ARTIFICIAL SEQUENCE
  Synthetic Construct
EKPYYK

SEQ ID NO: 11275 - protein, 6 aa, ARTIFICIAL SEQUENCE
  Synthetic Construct
EKQAAK

SEQ ID NO: 11276 - protein, 6 aa, ARTIFICIAL SEQUENCE
  Synthetic Construct
EKQADK

SEQ ID NO: 11277 - protein, 6 aa, ARTIFICIAL SEQUENCE
  Synthetic Construct
EKQAEK

SEQ ID NO: 11278 - protein, 6 aa, ARTIFICIAL SEQUENCE
  Synthetic Construct
EKQAFK

SEQ ID NO: 11279 - protein, 6 aa, ARTIFICIAL SEQUENCE
  Synthetic Construct
EKQAGK

SEQ ID NO: 11280 - protein, 6 aa, ARTIFICIAL SEQUENCE
  Synthetic Construct
EKQAHK

SEQ ID NO: 11281 - protein, 6 aa, ARTIFICIAL SEQUENCE
  Synthetic Construct
EKQAIK

SEQ ID NO: 11282 - protein, 6 aa, ARTIFICIAL SEQUENCE
  Synthetic Construct
EKQALK

SEQ ID NO: 11283 - protein, 6 aa, ARTIFICIAL SEQUENCE
  Synthetic Construct
EKQANK

SEQ ID NO: 11284 - protein, 6 aa, ARTIFICIAL SEQUENCE
  Synthetic Construct
EKQAQK

SEQ ID NO: 11285 - protein, 6 aa, ARTIFICIAL SEQUENCE
  Synthetic Construct
EKQARK

SEQ ID NO: 11286 - protein, 6 aa, ARTIFICIAL SEQUENCE
  Synthetic Construct
EKQASK

SEQ ID NO: 11287 - protein, 6 aa, ARTIFICIAL SEQUENCE
  Synthetic Construct
EKQATK

SEQ ID NO: 11288 - protein, 6 aa, ARTIFICIAL SEQUENCE
  Synthetic Construct
EKQAYK

SEQ ID NO: 11289 - protein, 6 aa, ARTIFICIAL SEQUENCE
  Synthetic Construct
EKQDAK

SEQ ID NO: 11290 - protein, 6 aa, ARTIFICIAL SEQUENCE
  Synthetic Construct
EKQDDK

SEQ ID NO: 11291 - protein, 6 aa, ARTIFICIAL SEQUENCE
  Synthetic Construct
EKQDEK

SEQ ID NO: 11292 - protein, 6 aa, ARTIFICIAL SEQUENCE
  Synthetic Construct
EKQDFK

SEQ ID NO: 11293 - protein, 6 aa, ARTIFICIAL SEQUENCE
  Synthetic Construct
EKQDGK

SEQ ID NO: 11294 - protein, 6 aa, ARTIFICIAL SEQUENCE
  Synthetic Construct
EKQDHK

SEQ ID NO: 11295 - protein, 6 aa, ARTIFICIAL SEQUENCE
  Synthetic Construct
EKQDIK

SEQ ID NO: 11296 - protein, 6 aa, ARTIFICIAL SEQUENCE
  Synthetic Construct
EKQDLK

SEQ ID NO: 11297 - protein, 6 aa, ARTIFICIAL SEQUENCE
  Synthetic Construct
EKQDNK

SEQ ID NO: 11298 - protein, 6 aa, ARTIFICIAL SEQUENCE
  Synthetic Construct
EKQDQK

SEQ ID NO: 11299 - protein, 6 aa, ARTIFICIAL SEQUENCE
  Synthetic Construct
EKQDRK

SEQ ID NO: 11300 - protein, 6 aa, ARTIFICIAL SEQUENCE
  Synthetic Construct
EKQDSK

SEQ ID NO: 11301 - protein, 6 aa, ARTIFICIAL SEQUENCE
  Synthetic Construct
EKQDTK

SEQ ID NO: 11302 - protein, 6 aa, ARTIFICIAL SEQUENCE
  Synthetic Construct
EKQDYK

SEQ ID NO: 11303 - protein, 6 aa, ARTIFICIAL SEQUENCE
  Synthetic Construct
EKQEAK

SEQ ID NO: 11304 - protein, 6 aa, ARTIFICIAL SEQUENCE
  Synthetic Construct
EKQEDK

SEQ ID NO: 11305 - protein, 6 aa, ARTIFICIAL SEQUENCE
  Synthetic Construct
EKQEEK

SEQ ID NO: 11306 - protein, 6 aa, ARTIFICIAL SEQUENCE
  Synthetic Construct
EKQEFK

SEQ ID NO: 11307 - protein, 6 aa, ARTIFICIAL SEQUENCE
  Synthetic Construct
EKQEGK

SEQ ID NO: 11308 - protein, 6 aa, ARTIFICIAL SEQUENCE
  Synthetic Construct
EKQEHK

SEQ ID NO: 11309 - protein, 6 aa, ARTIFICIAL SEQUENCE
  Synthetic Construct
EKQEIK

SEQ ID NO: 11310 - protein, 6 aa, ARTIFICIAL SEQUENCE
  Synthetic Construct
EKQELK

SEQ ID NO: 11311 - protein, 6 aa, ARTIFICIAL SEQUENCE
  Synthetic Construct
EKQENK

SEQ ID NO: 11312 - protein, 6 aa, ARTIFICIAL SEQUENCE
  Synthetic Construct
EKQEQK

SEQ ID NO: 11313 - protein, 6 aa, ARTIFICIAL SEQUENCE
  Synthetic Construct
EKQERK

SEQ ID NO: 11314 - protein, 6 aa, ARTIFICIAL SEQUENCE
  Synthetic Construct
EKQESK

SEQ ID NO: 11315 - protein, 6 aa, ARTIFICIAL SEQUENCE
  Synthetic Construct
EKQETK

SEQ ID NO: 11316 - protein, 6 aa, ARTIFICIAL SEQUENCE
  Synthetic Construct
EKQEYK

SEQ ID NO: 11317 - protein, 6 aa, ARTIFICIAL SEQUENCE
  Synthetic Construct
EKQFAK

SEQ ID NO: 11318 - protein, 6 aa, ARTIFICIAL SEQUENCE
  Synthetic Construct
EKQFDK

SEQ ID NO: 11319 - protein, 6 aa, ARTIFICIAL SEQUENCE
  Synthetic Construct
EKQFEK

SEQ ID NO: 11320 - protein, 6 aa, ARTIFICIAL SEQUENCE
  Synthetic Construct
EKQFFK

SEQ ID NO: 11321 - protein, 6 aa, ARTIFICIAL SEQUENCE
  Synthetic Construct
EKQFGK

SEQ ID NO: 11322 - protein, 6 aa, ARTIFICIAL SEQUENCE
  Synthetic Construct
EKQFHK

SEQ ID NO: 11323 - protein, 6 aa, ARTIFICIAL SEQUENCE
  Synthetic Construct
EKQFIK

SEQ ID NO: 11324 - protein, 6 aa, ARTIFICIAL SEQUENCE
  Synthetic Construct
EKQFLK

SEQ ID NO: 11325 - protein, 6 aa, ARTIFICIAL SEQUENCE
  Synthetic Construct
EKQFNK

SEQ ID NO: 11326 - protein, 6 aa, ARTIFICIAL SEQUENCE
  Synthetic Construct
EKQFQK

SEQ ID NO: 11327 - protein, 6 aa, ARTIFICIAL SEQUENCE
  Synthetic Construct
EKQFRK

SEQ ID NO: 11328 - protein, 6 aa, ARTIFICIAL SEQUENCE
  Synthetic Construct
EKQFSK

SEQ ID NO: 11329 - protein, 6 aa, ARTIFICIAL SEQUENCE
  Synthetic Construct
EKQFTK

SEQ ID NO: 11330 - protein, 6 aa, ARTIFICIAL SEQUENCE
  Synthetic Construct
EKQFYK

SEQ ID NO: 11331 - protein, 6 aa, ARTIFICIAL SEQUENCE
  Synthetic Construct
EKQGAK

SEQ ID NO: 11332 - protein, 6 aa, ARTIFICIAL SEQUENCE
  Synthetic Construct
EKQGDK

SEQ ID NO: 11333 - protein, 6 aa, ARTIFICIAL SEQUENCE
  Synthetic Construct
EKQGEK

SEQ ID NO: 11334 - protein, 6 aa, ARTIFICIAL SEQUENCE
  Synthetic Construct
EKQGFK

SEQ ID NO: 11335 - protein, 6 aa, ARTIFICIAL SEQUENCE
  Synthetic Construct
EKQGGK

SEQ ID NO: 11336 - protein, 6 aa, ARTIFICIAL SEQUENCE
  Synthetic Construct
EKQGHK

SEQ ID NO: 11337 - protein, 6 aa, ARTIFICIAL SEQUENCE
  Synthetic Construct
EKQGIK

SEQ ID NO: 11338 - protein, 6 aa, ARTIFICIAL SEQUENCE
  Synthetic Construct
EKQGLK

SEQ ID NO: 11339 - protein, 6 aa, ARTIFICIAL SEQUENCE
  Synthetic Construct
EKQGNK

SEQ ID NO: 11340 - protein, 6 aa, ARTIFICIAL SEQUENCE
  Synthetic Construct
EKQGQK

SEQ ID NO: 11341 - protein, 6 aa, ARTIFICIAL SEQUENCE
  Synthetic Construct
EKQGRK

SEQ ID NO: 11342 - protein, 6 aa, ARTIFICIAL SEQUENCE
  Synthetic Construct
EKQGSK

SEQ ID NO: 11343 - protein, 6 aa, ARTIFICIAL SEQUENCE
  Synthetic Construct
EKQGTK

SEQ ID NO: 11344 - protein, 6 aa, ARTIFICIAL SEQUENCE
  Synthetic Construct
EKQGYK

SEQ ID NO: 11345 - protein, 6 aa, ARTIFICIAL SEQUENCE
  Synthetic Construct
EKQHAK

SEQ ID NO: 11346 - protein, 6 aa, ARTIFICIAL SEQUENCE
  Synthetic Construct
EKQHDK

SEQ ID NO: 11347 - protein, 6 aa, ARTIFICIAL SEQUENCE
  Synthetic Construct
EKQHEK

SEQ ID NO: 11348 - protein, 6 aa, ARTIFICIAL SEQUENCE
  Synthetic Construct
EKQHFK

SEQ ID NO: 11349 - protein, 6 aa, ARTIFICIAL SEQUENCE
  Synthetic Construct
EKQHGK

SEQ ID NO: 11350 - protein, 6 aa, ARTIFICIAL SEQUENCE
  Synthetic Construct
EKQHHK

SEQ ID NO: 11351 - protein, 6 aa, ARTIFICIAL SEQUENCE
  Synthetic Construct
EKQHIK

SEQ ID NO: 11352 - protein, 6 aa, ARTIFICIAL SEQUENCE
  Synthetic Construct
EKQHLK

SEQ ID NO: 11353 - protein, 6 aa, ARTIFICIAL SEQUENCE
  Synthetic Construct
EKQHNK

SEQ ID NO: 11354 - protein, 6 aa, ARTIFICIAL SEQUENCE
  Synthetic Construct
EKQHQK

SEQ ID NO: 11355 - protein, 6 aa, ARTIFICIAL SEQUENCE
  Synthetic Construct
EKQHRK

SEQ ID NO: 11356 - protein, 6 aa, ARTIFICIAL SEQUENCE
  Synthetic Construct
EKQHSK

SEQ ID NO: 11357 - protein, 6 aa, ARTIFICIAL SEQUENCE
  Synthetic Construct
EKQHTK

SEQ ID NO: 11358 - protein, 6 aa, ARTIFICIAL SEQUENCE
  Synthetic Construct
EKQHYK

SEQ ID NO: 11359 - protein, 6 aa, ARTIFICIAL SEQUENCE
  Synthetic Construct
EKQIAK

SEQ ID NO: 11360 - protein, 6 aa, ARTIFICIAL SEQUENCE
  Synthetic Construct
EKQIDK

SEQ ID NO: 11361 - protein, 6 aa, ARTIFICIAL SEQUENCE
  Synthetic Construct
EKQIEK

SEQ ID NO: 11362 - protein, 6 aa, ARTIFICIAL SEQUENCE
  Synthetic Construct
EKQIFK

SEQ ID NO: 11363 - protein, 6 aa, ARTIFICIAL SEQUENCE
  Synthetic Construct
EKQIGK

SEQ ID NO: 11364 - protein, 6 aa, ARTIFICIAL SEQUENCE
  Synthetic Construct
EKQIHK

SEQ ID NO: 11365 - protein, 6 aa, ARTIFICIAL SEQUENCE
  Synthetic Construct
EKQIIK

SEQ ID NO: 11366 - protein, 6 aa, ARTIFICIAL SEQUENCE
  Synthetic Construct
EKQILK

SEQ ID NO: 11367 - protein, 6 aa, ARTIFICIAL SEQUENCE
  Synthetic Construct
EKQINK

SEQ ID NO: 11368 - protein, 6 aa, ARTIFICIAL SEQUENCE
  Synthetic Construct
EKQIQK

SEQ ID NO: 11369 - protein, 6 aa, ARTIFICIAL SEQUENCE
  Synthetic Construct
EKQIRK

SEQ ID NO: 11370 - protein, 6 aa, ARTIFICIAL SEQUENCE
  Synthetic Construct
EKQISK

SEQ ID NO: 11371 - protein, 6 aa, ARTIFICIAL SEQUENCE
  Synthetic Construct
EKQITK

SEQ ID NO: 11372 - protein, 6 aa, ARTIFICIAL SEQUENCE
  Synthetic Construct
EKQIYK

SEQ ID NO: 11373 - protein, 6 aa, ARTIFICIAL SEQUENCE
  Synthetic Construct
EKQLAK

SEQ ID NO: 11374 - protein, 6 aa, ARTIFICIAL SEQUENCE
  Synthetic Construct
EKQLDK

SEQ ID NO: 11375 - protein, 6 aa, ARTIFICIAL SEQUENCE
  Synthetic Construct
EKQLEK

SEQ ID NO: 11376 - protein, 6 aa, ARTIFICIAL SEQUENCE
  Synthetic Construct
EKQLFK

SEQ ID NO: 11377 - protein, 6 aa, ARTIFICIAL SEQUENCE
  Synthetic Construct
EKQLGK

SEQ ID NO: 11378 - protein, 6 aa, ARTIFICIAL SEQUENCE
  Synthetic Construct
EKQLHK

SEQ ID NO: 11379 - protein, 6 aa, ARTIFICIAL SEQUENCE
  Synthetic Construct
EKQLIK

SEQ ID NO: 11380 - protein, 6 aa, ARTIFICIAL SEQUENCE
  Synthetic Construct
EKQLLK

SEQ ID NO: 11381 - protein, 6 aa, ARTIFICIAL SEQUENCE
  Synthetic Construct
EKQLNK

SEQ ID NO: 11382 - protein, 6 aa, ARTIFICIAL SEQUENCE
  Synthetic Construct
EKQLQK

SEQ ID NO: 11383 - protein, 6 aa, ARTIFICIAL SEQUENCE
  Synthetic Construct
EKQLRK

SEQ ID NO: 11384 - protein, 6 aa, ARTIFICIAL SEQUENCE
  Synthetic Construct
EKQLSK

SEQ ID NO: 11385 - protein, 6 aa, ARTIFICIAL SEQUENCE
  Synthetic Construct
EKQLTK

SEQ ID NO: 11386 - protein, 6 aa, ARTIFICIAL SEQUENCE
  Synthetic Construct
EKQLYK

SEQ ID NO: 11387 - protein, 6 aa, ARTIFICIAL SEQUENCE
  Synthetic Construct
EKQNAK

SEQ ID NO: 11388 - protein, 6 aa, ARTIFICIAL SEQUENCE
  Synthetic Construct
EKQNDK

SEQ ID NO: 11389 - protein, 6 aa, ARTIFICIAL SEQUENCE
  Synthetic Construct
EKQNEK

SEQ ID NO: 11390 - protein, 6 aa, ARTIFICIAL SEQUENCE
  Synthetic Construct
EKQNFK

SEQ ID NO: 11391 - protein, 6 aa, ARTIFICIAL SEQUENCE
  Synthetic Construct
EKQNGK

SEQ ID NO: 11392 - protein, 6 aa, ARTIFICIAL SEQUENCE
  Synthetic Construct
EKQNHK

SEQ ID NO: 11393 - protein, 6 aa, ARTIFICIAL SEQUENCE
  Synthetic Construct
EKQNIK

SEQ ID NO: 11394 - protein, 6 aa, ARTIFICIAL SEQUENCE
  Synthetic Construct
EKQNLK

SEQ ID NO: 11395 - protein, 6 aa, ARTIFICIAL SEQUENCE
  Synthetic Construct
EKQNNK

SEQ ID NO: 11396 - protein, 6 aa, ARTIFICIAL SEQUENCE
  Synthetic Construct
EKQNQK

SEQ ID NO: 11397 - protein, 6 aa, ARTIFICIAL SEQUENCE
  Synthetic Construct
EKQNRK

SEQ ID NO: 11398 - protein, 6 aa, ARTIFICIAL SEQUENCE
  Synthetic Construct
EKQNSK

SEQ ID NO: 11399 - protein, 6 aa, ARTIFICIAL SEQUENCE
  Synthetic Construct
EKQNTK

SEQ ID NO: 11400 - protein, 6 aa, ARTIFICIAL SEQUENCE
  Synthetic Construct
EKQNYK

SEQ ID NO: 11401 - protein, 6 aa, ARTIFICIAL SEQUENCE
  Synthetic Construct
EKQQAK

SEQ ID NO: 11402 - protein, 6 aa, ARTIFICIAL SEQUENCE
  Synthetic Construct
EKQQDK

SEQ ID NO: 11403 - protein, 6 aa, ARTIFICIAL SEQUENCE
  Synthetic Construct
EKQQEK

SEQ ID NO: 11404 - protein, 6 aa, ARTIFICIAL SEQUENCE
  Synthetic Construct
EKQQFK

SEQ ID NO: 11405 - protein, 6 aa, ARTIFICIAL SEQUENCE
  Synthetic Construct
EKQQGK

SEQ ID NO: 11406 - protein, 6 aa, ARTIFICIAL SEQUENCE
  Synthetic Construct
EKQQHK

SEQ ID NO: 11407 - protein, 6 aa, ARTIFICIAL SEQUENCE
  Synthetic Construct
EKQQIK

SEQ ID NO: 11408 - protein, 6 aa, ARTIFICIAL SEQUENCE
  Synthetic Construct
EKQQLK

SEQ ID NO: 11409 - protein, 6 aa, ARTIFICIAL SEQUENCE
  Synthetic Construct
EKQQNK

SEQ ID NO: 11410 - protein, 6 aa, ARTIFICIAL SEQUENCE
  Synthetic Construct
EKQQQK

SEQ ID NO: 11411 - protein, 6 aa, ARTIFICIAL SEQUENCE
  Synthetic Construct
EKQQRK

SEQ ID NO: 11412 - protein, 6 aa, ARTIFICIAL SEQUENCE
  Synthetic Construct
EKQQSK

SEQ ID NO: 11413 - protein, 6 aa, ARTIFICIAL SEQUENCE
  Synthetic Construct
EKQQTK

SEQ ID NO: 11414 - protein, 6 aa, ARTIFICIAL SEQUENCE
  Synthetic Construct
EKQQYK

SEQ ID NO: 11415 - protein, 6 aa, ARTIFICIAL SEQUENCE
  Synthetic Construct
EKQRAK

SEQ ID NO: 11416 - protein, 6 aa, ARTIFICIAL SEQUENCE
  Synthetic Construct
EKQRDK

SEQ ID NO: 11417 - protein, 6 aa, ARTIFICIAL SEQUENCE
  Synthetic Construct
EKQREK

SEQ ID NO: 11418 - protein, 6 aa, ARTIFICIAL SEQUENCE
  Synthetic Construct
EKQRFK

SEQ ID NO: 11419 - protein, 6 aa, ARTIFICIAL SEQUENCE
  Synthetic Construct
EKQRGK

SEQ ID NO: 11420 - protein, 6 aa, ARTIFICIAL SEQUENCE
  Synthetic Construct
EKQRHK

SEQ ID NO: 11421 - protein, 6 aa, ARTIFICIAL SEQUENCE
  Synthetic Construct
EKQRIK

SEQ ID NO: 11422 - protein, 6 aa, ARTIFICIAL SEQUENCE
  Synthetic Construct
EKQRLK

SEQ ID NO: 11423 - protein, 6 aa, ARTIFICIAL SEQUENCE
  Synthetic Construct
EKQRNK

SEQ ID NO: 11424 - protein, 6 aa, ARTIFICIAL SEQUENCE
  Synthetic Construct
EKQRQK

SEQ ID NO: 11425 - protein, 6 aa, ARTIFICIAL SEQUENCE
  Synthetic Construct
EKQRRK

SEQ ID NO: 11426 - protein, 6 aa, ARTIFICIAL SEQUENCE
  Synthetic Construct
EKQRSK

SEQ ID NO: 11427 - protein, 6 aa, ARTIFICIAL SEQUENCE
  Synthetic Construct
EKQRTK

SEQ ID NO: 11428 - protein, 6 aa, ARTIFICIAL SEQUENCE
  Synthetic Construct
EKQRYK

SEQ ID NO: 11429 - protein, 6 aa, ARTIFICIAL SEQUENCE
  Synthetic Construct
EKQSAK

SEQ ID NO: 11430 - protein, 6 aa, ARTIFICIAL SEQUENCE
  Synthetic Construct
EKQSDK

SEQ ID NO: 11431 - protein, 6 aa, ARTIFICIAL SEQUENCE
  Synthetic Construct
EKQSEK

SEQ ID NO: 11432 - protein, 6 aa, ARTIFICIAL SEQUENCE
  Synthetic Construct
EKQSFK

SEQ ID NO: 11433 - protein, 6 aa, ARTIFICIAL SEQUENCE
  Synthetic Construct
EKQSGK

SEQ ID NO: 11434 - protein, 6 aa, ARTIFICIAL SEQUENCE
  Synthetic Construct
EKQSHK

SEQ ID NO: 11435 - protein, 6 aa, ARTIFICIAL SEQUENCE
  Synthetic Construct
EKQSIK

SEQ ID NO: 11436 - protein, 6 aa, ARTIFICIAL SEQUENCE
  Synthetic Construct
EKQSLK

SEQ ID NO: 11437 - protein, 6 aa, ARTIFICIAL SEQUENCE
  Synthetic Construct
EKQSNK

SEQ ID NO: 11438 - protein, 6 aa, ARTIFICIAL SEQUENCE
  Synthetic Construct
EKQSQK

SEQ ID NO: 11439 - protein, 6 aa, ARTIFICIAL SEQUENCE
  Synthetic Construct
EKQSRK

SEQ ID NO: 11440 - protein, 6 aa, ARTIFICIAL SEQUENCE
  Synthetic Construct
EKQSSK

SEQ ID NO: 11441 - protein, 6 aa, ARTIFICIAL SEQUENCE
  Synthetic Construct
EKQSTK

SEQ ID NO: 11442 - protein, 6 aa, ARTIFICIAL SEQUENCE
  Synthetic Construct
EKQSYK

SEQ ID NO: 11443 - protein, 6 aa, ARTIFICIAL SEQUENCE
  Synthetic Construct
EKQTAK

SEQ ID NO: 11444 - protein, 6 aa, ARTIFICIAL SEQUENCE
  Synthetic Construct
EKQTDK

SEQ ID NO: 11445 - protein, 6 aa, ARTIFICIAL SEQUENCE
  Synthetic Construct
EKQTEK

SEQ ID NO: 11446 - protein, 6 aa, ARTIFICIAL SEQUENCE
  Synthetic Construct
EKQTFK

SEQ ID NO: 11447 - protein, 6 aa, ARTIFICIAL SEQUENCE
  Synthetic Construct
EKQTGK

SEQ ID NO: 11448 - protein, 6 aa, ARTIFICIAL SEQUENCE
  Synthetic Construct
EKQTHK

SEQ ID NO: 11449 - protein, 6 aa, ARTIFICIAL SEQUENCE
  Synthetic Construct
EKQTIK

SEQ ID NO: 11450 - protein, 6 aa, ARTIFICIAL SEQUENCE
  Synthetic Construct
EKQTLK

SEQ ID NO: 11451 - protein, 6 aa, ARTIFICIAL SEQUENCE
  Synthetic Construct
EKQTNK

SEQ ID NO: 11452 - protein, 6 aa, ARTIFICIAL SEQUENCE
  Synthetic Construct
EKQTQK

SEQ ID NO: 11453 - protein, 6 aa, ARTIFICIAL SEQUENCE
  Synthetic Construct
EKQTRK

SEQ ID NO: 11454 - protein, 6 aa, ARTIFICIAL SEQUENCE
  Synthetic Construct
EKQTSK

SEQ ID NO: 11455 - protein, 6 aa, ARTIFICIAL SEQUENCE
  Synthetic Construct
EKQTTK

SEQ ID NO: 11456 - protein, 6 aa, ARTIFICIAL SEQUENCE
  Synthetic Construct
EKQTYK

SEQ ID NO: 11457 - protein, 6 aa, ARTIFICIAL SEQUENCE
  Synthetic Construct
EKQYAK

SEQ ID NO: 11458 - protein, 6 aa, ARTIFICIAL SEQUENCE
  Synthetic Construct
EKQYDK

SEQ ID NO: 11459 - protein, 6 aa, ARTIFICIAL SEQUENCE
  Synthetic Construct
EKQYEK

SEQ ID NO: 11460 - protein, 6 aa, ARTIFICIAL SEQUENCE
  Synthetic Construct
EKQYFK

SEQ ID NO: 11461 - protein, 6 aa, ARTIFICIAL SEQUENCE
  Synthetic Construct
EKQYGK

SEQ ID NO: 11462 - protein, 6 aa, ARTIFICIAL SEQUENCE
  Synthetic Construct
EKQYHK

SEQ ID NO: 11463 - protein, 6 aa, ARTIFICIAL SEQUENCE
  Synthetic Construct
EKQYIK

SEQ ID NO: 11464 - protein, 6 aa, ARTIFICIAL SEQUENCE
  Synthetic Construct
EKQYLK

SEQ ID NO: 11465 - protein, 6 aa, ARTIFICIAL SEQUENCE
  Synthetic Construct
EKQYNK

SEQ ID NO: 11466 - protein, 6 aa, ARTIFICIAL SEQUENCE
  Synthetic Construct
EKQYQK

SEQ ID NO: 11467 - protein, 6 aa, ARTIFICIAL SEQUENCE
  Synthetic Construct
EKQYRK

SEQ ID NO: 11468 - protein, 6 aa, ARTIFICIAL SEQUENCE
  Synthetic Construct
EKQYSK

SEQ ID NO: 11469 - protein, 6 aa, ARTIFICIAL SEQUENCE
  Synthetic Construct
EKQYTK

SEQ ID NO: 11470 - protein, 6 aa, ARTIFICIAL SEQUENCE
  Synthetic Construct
EKQYYK

SEQ ID NO: 11471 - protein, 6 aa, ARTIFICIAL SEQUENCE
  Synthetic Construct
EKRAAK

SEQ ID NO: 11472 - protein, 6 aa, ARTIFICIAL SEQUENCE
  Synthetic Construct
EKRADK

SEQ ID NO: 11473 - protein, 6 aa, ARTIFICIAL SEQUENCE
  Synthetic Construct
EKRAEK

SEQ ID NO: 11474 - protein, 6 aa, ARTIFICIAL SEQUENCE
  Synthetic Construct
EKRAFK

SEQ ID NO: 11475 - protein, 6 aa, ARTIFICIAL SEQUENCE
  Synthetic Construct
EKRAGK

SEQ ID NO: 11476 - protein, 6 aa, ARTIFICIAL SEQUENCE
  Synthetic Construct
EKRAHK

SEQ ID NO: 11477 - protein, 6 aa, ARTIFICIAL SEQUENCE
  Synthetic Construct
EKRAIK

SEQ ID NO: 11478 - protein, 6 aa, ARTIFICIAL SEQUENCE
  Synthetic Construct
EKRALK

SEQ ID NO: 11479 - protein, 6 aa, ARTIFICIAL SEQUENCE
  Synthetic Construct
EKRANK

SEQ ID NO: 11480 - protein, 6 aa, ARTIFICIAL SEQUENCE
  Synthetic Construct
EKRAQK

SEQ ID NO: 11481 - protein, 6 aa, ARTIFICIAL SEQUENCE
  Synthetic Construct
EKRARK

SEQ ID NO: 11482 - protein, 6 aa, ARTIFICIAL SEQUENCE
  Synthetic Construct
EKRASK

SEQ ID NO: 11483 - protein, 6 aa, ARTIFICIAL SEQUENCE
  Synthetic Construct
EKRATK

SEQ ID NO: 11484 - protein, 6 aa, ARTIFICIAL SEQUENCE
  Synthetic Construct
EKRAYK

SEQ ID NO: 11485 - protein, 6 aa, ARTIFICIAL SEQUENCE
  Synthetic Construct
EKRDAK

SEQ ID NO: 11486 - protein, 6 aa, ARTIFICIAL SEQUENCE
  Synthetic Construct
EKRDDK

SEQ ID NO: 11487 - protein, 6 aa, ARTIFICIAL SEQUENCE
  Synthetic Construct
EKRDEK

SEQ ID NO: 11488 - protein, 6 aa, ARTIFICIAL SEQUENCE
  Synthetic Construct
EKRDFK

SEQ ID NO: 11489 - protein, 6 aa, ARTIFICIAL SEQUENCE
  Synthetic Construct
EKRDGK

SEQ ID NO: 11490 - protein, 6 aa, ARTIFICIAL SEQUENCE
  Synthetic Construct
EKRDHK

SEQ ID NO: 11491 - protein, 6 aa, ARTIFICIAL SEQUENCE
  Synthetic Construct
EKRDIK

SEQ ID NO: 11492 - protein, 6 aa, ARTIFICIAL SEQUENCE
  Synthetic Construct
EKRDLK

SEQ ID NO: 11493 - protein, 6 aa, ARTIFICIAL SEQUENCE
  Synthetic Construct
EKRDNK

SEQ ID NO: 11494 - protein, 6 aa, ARTIFICIAL SEQUENCE
  Synthetic Construct
EKRDQK

SEQ ID NO: 11495 - protein, 6 aa, ARTIFICIAL SEQUENCE
  Synthetic Construct
EKRDRK

SEQ ID NO: 11496 - protein, 6 aa, ARTIFICIAL SEQUENCE
  Synthetic Construct
EKRDSK

SEQ ID NO: 11497 - protein, 6 aa, ARTIFICIAL SEQUENCE
  Synthetic Construct
EKRDTK

SEQ ID NO: 11498 - protein, 6 aa, ARTIFICIAL SEQUENCE
  Synthetic Construct
EKRDYK

SEQ ID NO: 11499 - protein, 6 aa, ARTIFICIAL SEQUENCE
  Synthetic Construct
EKREAK

SEQ ID NO: 11500 - protein, 6 aa, ARTIFICIAL SEQUENCE
  Synthetic Construct
EKREDK

SEQ ID NO: 11501 - protein, 6 aa, ARTIFICIAL SEQUENCE
  Synthetic Construct
EKREEK

SEQ ID NO: 11502 - protein, 6 aa, ARTIFICIAL SEQUENCE
  Synthetic Construct
EKREFK

SEQ ID NO: 11503 - protein, 6 aa, ARTIFICIAL SEQUENCE
  Synthetic Construct
EKREGK

SEQ ID NO: 11504 - protein, 6 aa, ARTIFICIAL SEQUENCE
  Synthetic Construct
EKREHK

SEQ ID NO: 11505 - protein, 6 aa, ARTIFICIAL SEQUENCE
  Synthetic Construct
EKREIK

SEQ ID NO: 11506 - protein, 6 aa, ARTIFICIAL SEQUENCE
  Synthetic Construct
EKRELK

SEQ ID NO: 11507 - protein, 6 aa, ARTIFICIAL SEQUENCE
  Synthetic Construct
EKRENK

SEQ ID NO: 11508 - protein, 6 aa, ARTIFICIAL SEQUENCE
  Synthetic Construct
EKREQK

SEQ ID NO: 11509 - protein, 6 aa, ARTIFICIAL SEQUENCE
  Synthetic Construct
EKRERK

SEQ ID NO: 11510 - protein, 6 aa, ARTIFICIAL SEQUENCE
  Synthetic Construct
EKRESK

SEQ ID NO: 11511 - protein, 6 aa, ARTIFICIAL SEQUENCE
  Synthetic Construct
EKRETK

SEQ ID NO: 11512 - protein, 6 aa, ARTIFICIAL SEQUENCE
  Synthetic Construct
EKREYK

SEQ ID NO: 11513 - protein, 6 aa, ARTIFICIAL SEQUENCE
  Synthetic Construct
EKRFAK

SEQ ID NO: 11514 - protein, 6 aa, ARTIFICIAL SEQUENCE
  Synthetic Construct
EKRFDK

SEQ ID NO: 11515 - protein, 6 aa, ARTIFICIAL SEQUENCE
  Synthetic Construct
EKRFEK

SEQ ID NO: 11516 - protein, 6 aa, ARTIFICIAL SEQUENCE
  Synthetic Construct
EKRFFK

SEQ ID NO: 11517 - protein, 6 aa, ARTIFICIAL SEQUENCE
  Synthetic Construct
EKRFGK

SEQ ID NO: 11518 - protein, 6 aa, ARTIFICIAL SEQUENCE
  Synthetic Construct
EKRFHK

SEQ ID NO: 11519 - protein, 6 aa, ARTIFICIAL SEQUENCE
  Synthetic Construct
EKRFIK

SEQ ID NO: 11520 - protein, 6 aa, ARTIFICIAL SEQUENCE
  Synthetic Construct
EKRFLK

SEQ ID NO: 11521 - protein, 6 aa, ARTIFICIAL SEQUENCE
  Synthetic Construct
EKRFNK

SEQ ID NO: 11522 - protein, 6 aa, ARTIFICIAL SEQUENCE
  Synthetic Construct
EKRFQK

SEQ ID NO: 11523 - protein, 6 aa, ARTIFICIAL SEQUENCE
  Synthetic Construct
EKRFRK

SEQ ID NO: 11524 - protein, 6 aa, ARTIFICIAL SEQUENCE
  Synthetic Construct
EKRFSK

SEQ ID NO: 11525 - protein, 6 aa, ARTIFICIAL SEQUENCE
  Synthetic Construct
EKRFTK

SEQ ID NO: 11526 - protein, 6 aa, ARTIFICIAL SEQUENCE
  Synthetic Construct
EKRFYK

SEQ ID NO: 11527 - protein, 6 aa, ARTIFICIAL SEQUENCE
  Synthetic Construct
EKRGAK

SEQ ID NO: 11528 - protein, 6 aa, ARTIFICIAL SEQUENCE
  Synthetic Construct
EKRGDK

SEQ ID NO: 11529 - protein, 6 aa, ARTIFICIAL SEQUENCE
  Synthetic Construct
EKRGEK

SEQ ID NO: 11530 - protein, 6 aa, ARTIFICIAL SEQUENCE
  Synthetic Construct
EKRGFK

SEQ ID NO: 11531 - protein, 6 aa, ARTIFICIAL SEQUENCE
  Synthetic Construct
EKRGGK

SEQ ID NO: 11532 - protein, 6 aa, ARTIFICIAL SEQUENCE
  Synthetic Construct
EKRGHK

SEQ ID NO: 11533 - protein, 6 aa, ARTIFICIAL SEQUENCE
  Synthetic Construct
EKRGIK

SEQ ID NO: 11534 - protein, 6 aa, ARTIFICIAL SEQUENCE
  Synthetic Construct
EKRGLK

SEQ ID NO: 11535 - protein, 6 aa, ARTIFICIAL SEQUENCE
  Synthetic Construct
EKRGNK

SEQ ID NO: 11536 - protein, 6 aa, ARTIFICIAL SEQUENCE
  Synthetic Construct
EKRGQK

SEQ ID NO: 11537 - protein, 6 aa, ARTIFICIAL SEQUENCE
  Synthetic Construct
EKRGRK

SEQ ID NO: 11538 - protein, 6 aa, ARTIFICIAL SEQUENCE
  Synthetic Construct
EKRGSK

SEQ ID NO: 11539 - protein, 6 aa, ARTIFICIAL SEQUENCE
  Synthetic Construct
EKRGTK

SEQ ID NO: 11540 - protein, 6 aa, ARTIFICIAL SEQUENCE
  Synthetic Construct
EKRGYK

SEQ ID NO: 11541 - protein, 6 aa, ARTIFICIAL SEQUENCE
  Synthetic Construct
EKRHAK

SEQ ID NO: 11542 - protein, 6 aa, ARTIFICIAL SEQUENCE
  Synthetic Construct
EKRHDK

SEQ ID NO: 11543 - protein, 6 aa, ARTIFICIAL SEQUENCE
  Synthetic Construct
EKRHEK

SEQ ID NO: 11544 - protein, 6 aa, ARTIFICIAL SEQUENCE
  Synthetic Construct
EKRHFK

SEQ ID NO: 11545 - protein, 6 aa, ARTIFICIAL SEQUENCE
  Synthetic Construct
EKRHGK

SEQ ID NO: 11546 - protein, 6 aa, ARTIFICIAL SEQUENCE
  Synthetic Construct
EKRHHK

SEQ ID NO: 11547 - protein, 6 aa, ARTIFICIAL SEQUENCE
  Synthetic Construct
EKRHIK

SEQ ID NO: 11548 - protein, 6 aa, ARTIFICIAL SEQUENCE
  Synthetic Construct
EKRHLK

SEQ ID NO: 11549 - protein, 6 aa, ARTIFICIAL SEQUENCE
  Synthetic Construct
EKRHNK

SEQ ID NO: 11550 - protein, 6 aa, ARTIFICIAL SEQUENCE
  Synthetic Construct
EKRHQK

SEQ ID NO: 11551 - protein, 6 aa, ARTIFICIAL SEQUENCE
  Synthetic Construct
EKRHRK

SEQ ID NO: 11552 - protein, 6 aa, ARTIFICIAL SEQUENCE
  Synthetic Construct
EKRHSK

SEQ ID NO: 11553 - protein, 6 aa, ARTIFICIAL SEQUENCE
  Synthetic Construct
EKRHTK

SEQ ID NO: 11554 - protein, 6 aa, ARTIFICIAL SEQUENCE
  Synthetic Construct
EKRHYK

SEQ ID NO: 11555 - protein, 6 aa, ARTIFICIAL SEQUENCE
  Synthetic Construct
EKRIAK

SEQ ID NO: 11556 - protein, 6 aa, ARTIFICIAL SEQUENCE
  Synthetic Construct
EKRIDK

SEQ ID NO: 11557 - protein, 6 aa, ARTIFICIAL SEQUENCE
  Synthetic Construct
EKRIEK

SEQ ID NO: 11558 - protein, 6 aa, ARTIFICIAL SEQUENCE
  Synthetic Construct
EKRIFK

SEQ ID NO: 11559 - protein, 6 aa, ARTIFICIAL SEQUENCE
  Synthetic Construct
EKRIGK

SEQ ID NO: 11560 - protein, 6 aa, ARTIFICIAL SEQUENCE
  Synthetic Construct
EKRIHK

SEQ ID NO: 11561 - protein, 6 aa, ARTIFICIAL SEQUENCE
  Synthetic Construct
EKRIIK

SEQ ID NO: 11562 - protein, 6 aa, ARTIFICIAL SEQUENCE
  Synthetic Construct
EKRILK

SEQ ID NO: 11563 - protein, 6 aa, ARTIFICIAL SEQUENCE
  Synthetic Construct
EKRINK

SEQ ID NO: 11564 - protein, 6 aa, ARTIFICIAL SEQUENCE
  Synthetic Construct
EKRIQK

SEQ ID NO: 11565 - protein, 6 aa, ARTIFICIAL SEQUENCE
  Synthetic Construct
EKRIRK

SEQ ID NO: 11566 - protein, 6 aa, ARTIFICIAL SEQUENCE
  Synthetic Construct
EKRISK

SEQ ID NO: 11567 - protein, 6 aa, ARTIFICIAL SEQUENCE
  Synthetic Construct
EKRITK

SEQ ID NO: 11568 - protein, 6 aa, ARTIFICIAL SEQUENCE
  Synthetic Construct
EKRIYK

SEQ ID NO: 11569 - protein, 6 aa, ARTIFICIAL SEQUENCE
  Synthetic Construct
EKRLAK

SEQ ID NO: 11570 - protein, 6 aa, ARTIFICIAL SEQUENCE
  Synthetic Construct
EKRLDK

SEQ ID NO: 11571 - protein, 6 aa, ARTIFICIAL SEQUENCE
  Synthetic Construct
EKRLEK

SEQ ID NO: 11572 - protein, 6 aa, ARTIFICIAL SEQUENCE
  Synthetic Construct
EKRLFK

SEQ ID NO: 11573 - protein, 6 aa, ARTIFICIAL SEQUENCE
  Synthetic Construct
EKRLGK

SEQ ID NO: 11574 - protein, 6 aa, ARTIFICIAL SEQUENCE
  Synthetic Construct
EKRLHK

SEQ ID NO: 11575 - protein, 6 aa, ARTIFICIAL SEQUENCE
  Synthetic Construct
EKRLIK

SEQ ID NO: 11576 - protein, 6 aa, ARTIFICIAL SEQUENCE
  Synthetic Construct
EKRLLK

SEQ ID NO: 11577 - protein, 6 aa, ARTIFICIAL SEQUENCE
  Synthetic Construct
EKRLNK

SEQ ID NO: 11578 - protein, 6 aa, ARTIFICIAL SEQUENCE
  Synthetic Construct
EKRLQK

SEQ ID NO: 11579 - protein, 6 aa, ARTIFICIAL SEQUENCE
  Synthetic Construct
EKRLRK

SEQ ID NO: 11580 - protein, 6 aa, ARTIFICIAL SEQUENCE
  Synthetic Construct
EKRLSK

SEQ ID NO: 11581 - protein, 6 aa, ARTIFICIAL SEQUENCE
  Synthetic Construct
EKRLTK

SEQ ID NO: 11582 - protein, 6 aa, ARTIFICIAL SEQUENCE
  Synthetic Construct
EKRLYK

SEQ ID NO: 11583 - protein, 6 aa, ARTIFICIAL SEQUENCE
  Synthetic Construct
EKRNAK

SEQ ID NO: 11584 - protein, 6 aa, ARTIFICIAL SEQUENCE
  Synthetic Construct
EKRNDK

SEQ ID NO: 11585 - protein, 6 aa, ARTIFICIAL SEQUENCE
  Synthetic Construct
EKRNEK

SEQ ID NO: 11586 - protein, 6 aa, ARTIFICIAL SEQUENCE
  Synthetic Construct
EKRNFK

SEQ ID NO: 11587 - protein, 6 aa, ARTIFICIAL SEQUENCE
  Synthetic Construct
EKRNGK

SEQ ID NO: 11588 - protein, 6 aa, ARTIFICIAL SEQUENCE
  Synthetic Construct
EKRNHK

SEQ ID NO: 11589 - protein, 6 aa, ARTIFICIAL SEQUENCE
  Synthetic Construct
EKRNIK

SEQ ID NO: 11590 - protein, 6 aa, ARTIFICIAL SEQUENCE
  Synthetic Construct
EKRNLK

SEQ ID NO: 11591 - protein, 6 aa, ARTIFICIAL SEQUENCE
  Synthetic Construct
EKRNNK

SEQ ID NO: 11592 - protein, 6 aa, ARTIFICIAL SEQUENCE
  Synthetic Construct
EKRNQK

SEQ ID NO: 11593 - protein, 6 aa, ARTIFICIAL SEQUENCE
  Synthetic Construct
EKRNRK

SEQ ID NO: 11594 - protein, 6 aa, ARTIFICIAL SEQUENCE
  Synthetic Construct
EKRNSK

SEQ ID NO: 11595 - protein, 6 aa, ARTIFICIAL SEQUENCE
  Synthetic Construct
EKRNTK

SEQ ID NO: 11596 - protein, 6 aa, ARTIFICIAL SEQUENCE
  Synthetic Construct
EKRNYK

SEQ ID NO: 11597 - protein, 6 aa, ARTIFICIAL SEQUENCE
  Synthetic Construct
EKRQAK

SEQ ID NO: 11598 - protein, 6 aa, ARTIFICIAL SEQUENCE
  Synthetic Construct
EKRQDK

SEQ ID NO: 11599 - protein, 6 aa, ARTIFICIAL SEQUENCE
  Synthetic Construct
EKRQEK

SEQ ID NO: 11600 - protein, 6 aa, ARTIFICIAL SEQUENCE
  Synthetic Construct
EKRQFK

SEQ ID NO: 11601 - protein, 6 aa, ARTIFICIAL SEQUENCE
  Synthetic Construct
EKRQGK

SEQ ID NO: 11602 - protein, 6 aa, ARTIFICIAL SEQUENCE
  Synthetic Construct
EKRQHK

SEQ ID NO: 11603 - protein, 6 aa, ARTIFICIAL SEQUENCE
  Synthetic Construct
EKRQIK

SEQ ID NO: 11604 - protein, 6 aa, ARTIFICIAL SEQUENCE
  Synthetic Construct
EKRQLK

SEQ ID NO: 11605 - protein, 6 aa, ARTIFICIAL SEQUENCE
  Synthetic Construct
EKRQNK

SEQ ID NO: 11606 - protein, 6 aa, ARTIFICIAL SEQUENCE
  Synthetic Construct
EKRQQK

SEQ ID NO: 11607 - protein, 6 aa, ARTIFICIAL SEQUENCE
  Synthetic Construct
EKRQRK

SEQ ID NO: 11608 - protein, 6 aa, ARTIFICIAL SEQUENCE
  Synthetic Construct
EKRQSK

SEQ ID NO: 11609 - protein, 6 aa, ARTIFICIAL SEQUENCE
  Synthetic Construct
EKRQTK

SEQ ID NO: 11610 - protein, 6 aa, ARTIFICIAL SEQUENCE
  Synthetic Construct
EKRQYK

SEQ ID NO: 11611 - protein, 6 aa, ARTIFICIAL SEQUENCE
  Synthetic Construct
EKRRAK

SEQ ID NO: 11612 - protein, 6 aa, ARTIFICIAL SEQUENCE
  Synthetic Construct
EKRRDK

SEQ ID NO: 11613 - protein, 6 aa, ARTIFICIAL SEQUENCE
  Synthetic Construct
EKRREK

SEQ ID NO: 11614 - protein, 6 aa, ARTIFICIAL SEQUENCE
  Synthetic Construct
EKRRFK

SEQ ID NO: 11615 - protein, 6 aa, ARTIFICIAL SEQUENCE
  Synthetic Construct
EKRRGK

SEQ ID NO: 11616 - protein, 6 aa, ARTIFICIAL SEQUENCE
  Synthetic Construct
EKRRHK

SEQ ID NO: 11617 - protein, 6 aa, ARTIFICIAL SEQUENCE
  Synthetic Construct
EKRRIK

SEQ ID NO: 11618 - protein, 6 aa, ARTIFICIAL SEQUENCE
  Synthetic Construct
EKRRLK

SEQ ID NO: 11619 - protein, 6 aa, ARTIFICIAL SEQUENCE
  Synthetic Construct
EKRRNK

SEQ ID NO: 11620 - protein, 6 aa, ARTIFICIAL SEQUENCE
  Synthetic Construct
EKRRQK

SEQ ID NO: 11621 - protein, 6 aa, ARTIFICIAL SEQUENCE
  Synthetic Construct
EKRRRK

SEQ ID NO: 11622 - protein, 6 aa, ARTIFICIAL SEQUENCE
  Synthetic Construct
EKRRSK

SEQ ID NO: 11623 - protein, 6 aa, ARTIFICIAL SEQUENCE
  Synthetic Construct
EKRRTK

SEQ ID NO: 11624 - protein, 6 aa, ARTIFICIAL SEQUENCE
  Synthetic Construct
EKRRYK

SEQ ID NO: 11625 - protein, 6 aa, ARTIFICIAL SEQUENCE
  Synthetic Construct
EKRSAK

SEQ ID NO: 11626 - protein, 6 aa, ARTIFICIAL SEQUENCE
  Synthetic Construct
EKRSDK

SEQ ID NO: 11627 - protein, 6 aa, ARTIFICIAL SEQUENCE
  Synthetic Construct
EKRSEK

SEQ ID NO: 11628 - protein, 6 aa, ARTIFICIAL SEQUENCE
  Synthetic Construct
EKRSFK

SEQ ID NO: 11629 - protein, 6 aa, ARTIFICIAL SEQUENCE
  Synthetic Construct
EKRSGK

SEQ ID NO: 11630 - protein, 6 aa, ARTIFICIAL SEQUENCE
  Synthetic Construct
EKRSHK

SEQ ID NO: 11631 - protein, 6 aa, ARTIFICIAL SEQUENCE
  Synthetic Construct
EKRSIK

SEQ ID NO: 11632 - protein, 6 aa, ARTIFICIAL SEQUENCE
  Synthetic Construct
EKRSLK

SEQ ID NO: 11633 - protein, 6 aa, ARTIFICIAL SEQUENCE
  Synthetic Construct
EKRSNK

SEQ ID NO: 11634 - protein, 6 aa, ARTIFICIAL SEQUENCE
  Synthetic Construct
EKRSQK

SEQ ID NO: 11635 - protein, 6 aa, ARTIFICIAL SEQUENCE
  Synthetic Construct
EKRSRK

SEQ ID NO: 11636 - protein, 6 aa, ARTIFICIAL SEQUENCE
  Synthetic Construct
EKRSSK

SEQ ID NO: 11637 - protein, 6 aa, ARTIFICIAL SEQUENCE
  Synthetic Construct
EKRSTK

SEQ ID NO: 11638 - protein, 6 aa, ARTIFICIAL SEQUENCE
  Synthetic Construct
EKRSYK

SEQ ID NO: 11639 - protein, 6 aa, ARTIFICIAL SEQUENCE
  Synthetic Construct
EKRTAK

SEQ ID NO: 11640 - protein, 6 aa, ARTIFICIAL SEQUENCE
  Synthetic Construct
EKRTDK

SEQ ID NO: 11641 - protein, 6 aa, ARTIFICIAL SEQUENCE
  Synthetic Construct
EKRTEK

SEQ ID NO: 11642 - protein, 6 aa, ARTIFICIAL SEQUENCE
  Synthetic Construct
EKRTFK

SEQ ID NO: 11643 - protein, 6 aa, ARTIFICIAL SEQUENCE
  Synthetic Construct
EKRTGK

SEQ ID NO: 11644 - protein, 6 aa, ARTIFICIAL SEQUENCE
  Synthetic Construct
EKRTHK

SEQ ID NO: 11645 - protein, 6 aa, ARTIFICIAL SEQUENCE
  Synthetic Construct
EKRTIK

SEQ ID NO: 11646 - protein, 6 aa, ARTIFICIAL SEQUENCE
  Synthetic Construct
EKRTLK

SEQ ID NO: 11647 - protein, 6 aa, ARTIFICIAL SEQUENCE
  Synthetic Construct
EKRTNK

SEQ ID NO: 11648 - protein, 6 aa, ARTIFICIAL SEQUENCE
  Synthetic Construct
EKRTQK

SEQ ID NO: 11649 - protein, 6 aa, ARTIFICIAL SEQUENCE
  Synthetic Construct
EKRTRK

SEQ ID NO: 11650 - protein, 6 aa, ARTIFICIAL SEQUENCE
  Synthetic Construct
EKRTSK

SEQ ID NO: 11651 - protein, 6 aa, ARTIFICIAL SEQUENCE
  Synthetic Construct
EKRTTK

SEQ ID NO: 11652 - protein, 6 aa, ARTIFICIAL SEQUENCE
  Synthetic Construct
EKRTYK

SEQ ID NO: 11653 - protein, 6 aa, ARTIFICIAL SEQUENCE
  Synthetic Construct
EKRYAK

SEQ ID NO: 11654 - protein, 6 aa, ARTIFICIAL SEQUENCE
  Synthetic Construct
EKRYDK

SEQ ID NO: 11655 - protein, 6 aa, ARTIFICIAL SEQUENCE
  Synthetic Construct
EKRYEK

SEQ ID NO: 11656 - protein, 6 aa, ARTIFICIAL SEQUENCE
  Synthetic Construct
EKRYFK

SEQ ID NO: 11657 - protein, 6 aa, ARTIFICIAL SEQUENCE
  Synthetic Construct
EKRYGK

SEQ ID NO: 11658 - protein, 6 aa, ARTIFICIAL SEQUENCE
  Synthetic Construct
EKRYHK

SEQ ID NO: 11659 - protein, 6 aa, ARTIFICIAL SEQUENCE
  Synthetic Construct
EKRYIK

SEQ ID NO: 11660 - protein, 6 aa, ARTIFICIAL SEQUENCE
  Synthetic Construct
EKRYLK

SEQ ID NO: 11661 - protein, 6 aa, ARTIFICIAL SEQUENCE
  Synthetic Construct
EKRYNK

SEQ ID NO: 11662 - protein, 6 aa, ARTIFICIAL SEQUENCE
  Synthetic Construct
EKRYQK

SEQ ID NO: 11663 - protein, 6 aa, ARTIFICIAL SEQUENCE
  Synthetic Construct
EKRYRK

SEQ ID NO: 11664 - protein, 6 aa, ARTIFICIAL SEQUENCE
  Synthetic Construct
EKRYSK

SEQ ID NO: 11665 - protein, 6 aa, ARTIFICIAL SEQUENCE
  Synthetic Construct
EKRYTK

SEQ ID NO: 11666 - protein, 6 aa, ARTIFICIAL SEQUENCE
  Synthetic Construct
EKRYYK

SEQ ID NO: 11667 - protein, 6 aa, ARTIFICIAL SEQUENCE
  Synthetic Construct
EKSAAK

SEQ ID NO: 11668 - protein, 6 aa, ARTIFICIAL SEQUENCE
  Synthetic Construct
EKSADK

SEQ ID NO: 11669 - protein, 6 aa, ARTIFICIAL SEQUENCE
  Synthetic Construct
EKSAEK

SEQ ID NO: 11670 - protein, 6 aa, ARTIFICIAL SEQUENCE
  Synthetic Construct
EKSAFK

SEQ ID NO: 11671 - protein, 6 aa, ARTIFICIAL SEQUENCE
  Synthetic Construct
EKSAGK

SEQ ID NO: 11672 - protein, 6 aa, ARTIFICIAL SEQUENCE
  Synthetic Construct
EKSAHK

SEQ ID NO: 11673 - protein, 6 aa, ARTIFICIAL SEQUENCE
  Synthetic Construct
EKSAIK

SEQ ID NO: 11674 - protein, 6 aa, ARTIFICIAL SEQUENCE
  Synthetic Construct
EKSALK

SEQ ID NO: 11675 - protein, 6 aa, ARTIFICIAL SEQUENCE
  Synthetic Construct
EKSANK

SEQ ID NO: 11676 - protein, 6 aa, ARTIFICIAL SEQUENCE
  Synthetic Construct
EKSAQK

SEQ ID NO: 11677 - protein, 6 aa, ARTIFICIAL SEQUENCE
  Synthetic Construct
EKSARK

SEQ ID NO: 11678 - protein, 6 aa, ARTIFICIAL SEQUENCE
  Synthetic Construct
EKSASK

SEQ ID NO: 11679 - protein, 6 aa, ARTIFICIAL SEQUENCE
  Synthetic Construct
EKSATK

SEQ ID NO: 11680 - protein, 6 aa, ARTIFICIAL SEQUENCE
  Synthetic Construct
EKSAYK

SEQ ID NO: 11681 - protein, 6 aa, ARTIFICIAL SEQUENCE
  Synthetic Construct
EKSDAK

SEQ ID NO: 11682 - protein, 6 aa, ARTIFICIAL SEQUENCE
  Synthetic Construct
EKSDDK

SEQ ID NO: 11683 - protein, 6 aa, ARTIFICIAL SEQUENCE
  Synthetic Construct
EKSDEK

SEQ ID NO: 11684 - protein, 6 aa, ARTIFICIAL SEQUENCE
  Synthetic Construct
EKSDFK

SEQ ID NO: 11685 - protein, 6 aa, ARTIFICIAL SEQUENCE
  Synthetic Construct
EKSDGK

SEQ ID NO: 11686 - protein, 6 aa, ARTIFICIAL SEQUENCE
  Synthetic Construct
EKSDHK

SEQ ID NO: 11687 - protein, 6 aa, ARTIFICIAL SEQUENCE
  Synthetic Construct
EKSDIK

SEQ ID NO: 11688 - protein, 6 aa, ARTIFICIAL SEQUENCE
  Synthetic Construct
EKSDLK

SEQ ID NO: 11689 - protein, 6 aa, ARTIFICIAL SEQUENCE
  Synthetic Construct
EKSDNK

SEQ ID NO: 11690 - protein, 6 aa, ARTIFICIAL SEQUENCE
  Synthetic Construct
EKSDQK

SEQ ID NO: 11691 - protein, 6 aa, ARTIFICIAL SEQUENCE
  Synthetic Construct
EKSDRK

SEQ ID NO: 11692 - protein, 6 aa, ARTIFICIAL SEQUENCE
  Synthetic Construct
EKSDSK

SEQ ID NO: 11693 - protein, 6 aa, ARTIFICIAL SEQUENCE
  Synthetic Construct
EKSDTK

SEQ ID NO: 11694 - protein, 6 aa, ARTIFICIAL SEQUENCE
  Synthetic Construct
EKSDYK

SEQ ID NO: 11695 - protein, 6 aa, ARTIFICIAL SEQUENCE
  Synthetic Construct
EKSEAK

SEQ ID NO: 11696 - protein, 6 aa, ARTIFICIAL SEQUENCE
  Synthetic Construct
EKSEDK

SEQ ID NO: 11697 - protein, 6 aa, ARTIFICIAL SEQUENCE
  Synthetic Construct
EKSEEK

SEQ ID NO: 11698 - protein, 6 aa, ARTIFICIAL SEQUENCE
  Synthetic Construct
EKSEFK

SEQ ID NO: 11699 - protein, 6 aa, ARTIFICIAL SEQUENCE
  Synthetic Construct
EKSEGK

SEQ ID NO: 11700 - protein, 6 aa, ARTIFICIAL SEQUENCE
  Synthetic Construct
EKSEHK

SEQ ID NO: 11701 - protein, 6 aa, ARTIFICIAL SEQUENCE
  Synthetic Construct
EKSEIK

SEQ ID NO: 11702 - protein, 6 aa, ARTIFICIAL SEQUENCE
  Synthetic Construct
EKSELK

SEQ ID NO: 11703 - protein, 6 aa, ARTIFICIAL SEQUENCE
  Synthetic Construct
EKSENK

SEQ ID NO: 11704 - protein, 6 aa, ARTIFICIAL SEQUENCE
  Synthetic Construct
EKSEQK

SEQ ID NO: 11705 - protein, 6 aa, ARTIFICIAL SEQUENCE
  Synthetic Construct
EKSERK

SEQ ID NO: 11706 - protein, 6 aa, ARTIFICIAL SEQUENCE
  Synthetic Construct
EKSESK

SEQ ID NO: 11707 - protein, 6 aa, ARTIFICIAL SEQUENCE
  Synthetic Construct
EKSETK

SEQ ID NO: 11708 - protein, 6 aa, ARTIFICIAL SEQUENCE
  Synthetic Construct
EKSEYK

SEQ ID NO: 11709 - protein, 6 aa, ARTIFICIAL SEQUENCE
  Synthetic Construct
EKSFAK

SEQ ID NO: 11710 - protein, 6 aa, ARTIFICIAL SEQUENCE
  Synthetic Construct
EKSFDK

SEQ ID NO: 11711 - protein, 6 aa, ARTIFICIAL SEQUENCE
  Synthetic Construct
EKSFEK

SEQ ID NO: 11712 - protein, 6 aa, ARTIFICIAL SEQUENCE
  Synthetic Construct
EKSFFK

SEQ ID NO: 11713 - protein, 6 aa, ARTIFICIAL SEQUENCE
  Synthetic Construct
EKSFGK

SEQ ID NO: 11714 - protein, 6 aa, ARTIFICIAL SEQUENCE
  Synthetic Construct
EKSFHK

SEQ ID NO: 11715 - protein, 6 aa, ARTIFICIAL SEQUENCE
  Synthetic Construct
EKSFIK

SEQ ID NO: 11716 - protein, 6 aa, ARTIFICIAL SEQUENCE
  Synthetic Construct
EKSFLK

SEQ ID NO: 11717 - protein, 6 aa, ARTIFICIAL SEQUENCE
  Synthetic Construct
EKSFNK

SEQ ID NO: 11718 - protein, 6 aa, ARTIFICIAL SEQUENCE
  Synthetic Construct
EKSFQK

SEQ ID NO: 11719 - protein, 6 aa, ARTIFICIAL SEQUENCE
  Synthetic Construct
EKSFRK

SEQ ID NO: 11720 - protein, 6 aa, ARTIFICIAL SEQUENCE
  Synthetic Construct
EKSFSK

SEQ ID NO: 11721 - protein, 6 aa, ARTIFICIAL SEQUENCE
  Synthetic Construct
EKSFTK

SEQ ID NO: 11722 - protein, 6 aa, ARTIFICIAL SEQUENCE
  Synthetic Construct
EKSFYK

SEQ ID NO: 11723 - protein, 6 aa, ARTIFICIAL SEQUENCE
  Synthetic Construct
EKSGAK

SEQ ID NO: 11724 - protein, 6 aa, ARTIFICIAL SEQUENCE
  Synthetic Construct
EKSGDK

SEQ ID NO: 11725 - protein, 6 aa, ARTIFICIAL SEQUENCE
  Synthetic Construct
EKSGEK

SEQ ID NO: 11726 - protein, 6 aa, ARTIFICIAL SEQUENCE
  Synthetic Construct
EKSGFK

SEQ ID NO: 11727 - protein, 6 aa, ARTIFICIAL SEQUENCE
  Synthetic Construct
EKSGGK

SEQ ID NO: 11728 - protein, 6 aa, ARTIFICIAL SEQUENCE
  Synthetic Construct
EKSGHK

SEQ ID NO: 11729 - protein, 6 aa, ARTIFICIAL SEQUENCE
  Synthetic Construct
EKSGIK

SEQ ID NO: 11730 - protein, 6 aa, ARTIFICIAL SEQUENCE
  Synthetic Construct
EKSGLK

SEQ ID NO: 11731 - protein, 6 aa, ARTIFICIAL SEQUENCE
  Synthetic Construct
EKSGNK

SEQ ID NO: 11732 - protein, 6 aa, ARTIFICIAL SEQUENCE
  Synthetic Construct
EKSGQK

SEQ ID NO: 11733 - protein, 6 aa, ARTIFICIAL SEQUENCE
  Synthetic Construct
EKSGRK

SEQ ID NO: 11734 - protein, 6 aa, ARTIFICIAL SEQUENCE
  Synthetic Construct
EKSGSK

SEQ ID NO: 11735 - protein, 6 aa, ARTIFICIAL SEQUENCE
  Synthetic Construct
EKSGTK

SEQ ID NO: 11736 - protein, 6 aa, ARTIFICIAL SEQUENCE
  Synthetic Construct
EKSGYK

SEQ ID NO: 11737 - protein, 6 aa, ARTIFICIAL SEQUENCE
  Synthetic Construct
EKSHAK

SEQ ID NO: 11738 - protein, 6 aa, ARTIFICIAL SEQUENCE
  Synthetic Construct
EKSHDK

SEQ ID NO: 11739 - protein, 6 aa, ARTIFICIAL SEQUENCE
  Synthetic Construct
EKSHEK

SEQ ID NO: 11740 - protein, 6 aa, ARTIFICIAL SEQUENCE
  Synthetic Construct
EKSHFK

SEQ ID NO: 11741 - protein, 6 aa, ARTIFICIAL SEQUENCE
  Synthetic Construct
EKSHGK

SEQ ID NO: 11742 - protein, 6 aa, ARTIFICIAL SEQUENCE
  Synthetic Construct
EKSHHK

SEQ ID NO: 11743 - protein, 6 aa, ARTIFICIAL SEQUENCE
  Synthetic Construct
EKSHIK

SEQ ID NO: 11744 - protein, 6 aa, ARTIFICIAL SEQUENCE
  Synthetic Construct
EKSHLK

SEQ ID NO: 11745 - protein, 6 aa, ARTIFICIAL SEQUENCE
  Synthetic Construct
EKSHNK

SEQ ID NO: 11746 - protein, 6 aa, ARTIFICIAL SEQUENCE
  Synthetic Construct
EKSHQK

SEQ ID NO: 11747 - protein, 6 aa, ARTIFICIAL SEQUENCE
  Synthetic Construct
EKSHRK

SEQ ID NO: 11748 - protein, 6 aa, ARTIFICIAL SEQUENCE
  Synthetic Construct
EKSHSK

SEQ ID NO: 11749 - protein, 6 aa, ARTIFICIAL SEQUENCE
  Synthetic Construct
EKSHTK

SEQ ID NO: 11750 - protein, 6 aa, ARTIFICIAL SEQUENCE
  Synthetic Construct
EKSHYK

SEQ ID NO: 11751 - protein, 6 aa, ARTIFICIAL SEQUENCE
  Synthetic Construct
EKSIAK

SEQ ID NO: 11752 - protein, 6 aa, ARTIFICIAL SEQUENCE
  Synthetic Construct
EKSIDK

SEQ ID NO: 11753 - protein, 6 aa, ARTIFICIAL SEQUENCE
  Synthetic Construct
EKSIEK

SEQ ID NO: 11754 - protein, 6 aa, ARTIFICIAL SEQUENCE
  Synthetic Construct
EKSIFK

SEQ ID NO: 11755 - protein, 6 aa, ARTIFICIAL SEQUENCE
  Synthetic Construct
EKSIGK

SEQ ID NO: 11756 - protein, 6 aa, ARTIFICIAL SEQUENCE
  Synthetic Construct
EKSIHK

SEQ ID NO: 11757 - protein, 6 aa, ARTIFICIAL SEQUENCE
  Synthetic Construct
EKSIIK

SEQ ID NO: 11758 - protein, 6 aa, ARTIFICIAL SEQUENCE
  Synthetic Construct
EKSILK

SEQ ID NO: 11759 - protein, 6 aa, ARTIFICIAL SEQUENCE
  Synthetic Construct
EKSINK

SEQ ID NO: 11760 - protein, 6 aa, ARTIFICIAL SEQUENCE
  Synthetic Construct
EKSIQK

SEQ ID NO: 11761 - protein, 6 aa, ARTIFICIAL SEQUENCE
  Synthetic Construct
EKSIRK

SEQ ID NO: 11762 - protein, 6 aa, ARTIFICIAL SEQUENCE
  Synthetic Construct
EKSISK

SEQ ID NO: 11763 - protein, 6 aa, ARTIFICIAL SEQUENCE
  Synthetic Construct
EKSITK

SEQ ID NO: 11764 - protein, 6 aa, ARTIFICIAL SEQUENCE
  Synthetic Construct
EKSIYK

SEQ ID NO: 11765 - protein, 6 aa, ARTIFICIAL SEQUENCE
  Synthetic Construct
EKSLAK

SEQ ID NO: 11766 - protein, 6 aa, ARTIFICIAL SEQUENCE
  Synthetic Construct
EKSLDK

SEQ ID NO: 11767 - protein, 6 aa, ARTIFICIAL SEQUENCE
  Synthetic Construct
EKSLEK

SEQ ID NO: 11768 - protein, 6 aa, ARTIFICIAL SEQUENCE
  Synthetic Construct
EKSLFK

SEQ ID NO: 11769 - protein, 6 aa, ARTIFICIAL SEQUENCE
  Synthetic Construct
EKSLGK

SEQ ID NO: 11770 - protein, 6 aa, ARTIFICIAL SEQUENCE
  Synthetic Construct
EKSLHK

SEQ ID NO: 11771 - protein, 6 aa, ARTIFICIAL SEQUENCE
  Synthetic Construct
EKSLIK

SEQ ID NO: 11772 - protein, 6 aa, ARTIFICIAL SEQUENCE
  Synthetic Construct
EKSLLK

SEQ ID NO: 11773 - protein, 6 aa, ARTIFICIAL SEQUENCE
  Synthetic Construct
EKSLNK

SEQ ID NO: 11774 - protein, 6 aa, ARTIFICIAL SEQUENCE
  Synthetic Construct
EKSLQK

SEQ ID NO: 11775 - protein, 6 aa, ARTIFICIAL SEQUENCE
  Synthetic Construct
EKSLRK

SEQ ID NO: 11776 - protein, 6 aa, ARTIFICIAL SEQUENCE
  Synthetic Construct
EKSLSK

SEQ ID NO: 11777 - protein, 6 aa, ARTIFICIAL SEQUENCE
  Synthetic Construct
EKSLTK

SEQ ID NO: 11778 - protein, 6 aa, ARTIFICIAL SEQUENCE
  Synthetic Construct
EKSLYK

SEQ ID NO: 11779 - protein, 6 aa, ARTIFICIAL SEQUENCE
  Synthetic Construct
EKSNAK

SEQ ID NO: 11780 - protein, 6 aa, ARTIFICIAL SEQUENCE
  Synthetic Construct
EKSNDK

SEQ ID NO: 11781 - protein, 6 aa, ARTIFICIAL SEQUENCE
  Synthetic Construct
EKSNEK

SEQ ID NO: 11782 - protein, 6 aa, ARTIFICIAL SEQUENCE
  Synthetic Construct
EKSNFK

SEQ ID NO: 11783 - protein, 6 aa, ARTIFICIAL SEQUENCE
  Synthetic Construct
EKSNGK

SEQ ID NO: 11784 - protein, 6 aa, ARTIFICIAL SEQUENCE
  Synthetic Construct
EKSNHK

SEQ ID NO: 11785 - protein, 6 aa, ARTIFICIAL SEQUENCE
  Synthetic Construct
EKSNIK

SEQ ID NO: 11786 - protein, 6 aa, ARTIFICIAL SEQUENCE
  Synthetic Construct
EKSNLK

SEQ ID NO: 11787 - protein, 6 aa, ARTIFICIAL SEQUENCE
  Synthetic Construct
EKSNNK

SEQ ID NO: 11788 - protein, 6 aa, ARTIFICIAL SEQUENCE
  Synthetic Construct
EKSNQK

SEQ ID NO: 11789 - protein, 6 aa, ARTIFICIAL SEQUENCE
  Synthetic Construct
EKSNRK

SEQ ID NO: 11790 - protein, 6 aa, ARTIFICIAL SEQUENCE
  Synthetic Construct
EKSNSK

SEQ ID NO: 11791 - protein, 6 aa, ARTIFICIAL SEQUENCE
  Synthetic Construct
EKSNTK

SEQ ID NO: 11792 - protein, 6 aa, ARTIFICIAL SEQUENCE
  Synthetic Construct
EKSNYK

SEQ ID NO: 11793 - protein, 6 aa, ARTIFICIAL SEQUENCE
  Synthetic Construct
EKSQAK

SEQ ID NO: 11794 - protein, 6 aa, ARTIFICIAL SEQUENCE
  Synthetic Construct
EKSQDK

SEQ ID NO: 11795 - protein, 6 aa, ARTIFICIAL SEQUENCE
  Synthetic Construct
EKSQEK

SEQ ID NO: 11796 - protein, 6 aa, ARTIFICIAL SEQUENCE
  Synthetic Construct
EKSQFK

SEQ ID NO: 11797 - protein, 6 aa, ARTIFICIAL SEQUENCE
  Synthetic Construct
EKSQGK

SEQ ID NO: 11798 - protein, 6 aa, ARTIFICIAL SEQUENCE
  Synthetic Construct
EKSQHK

SEQ ID NO: 11799 - protein, 6 aa, ARTIFICIAL SEQUENCE
  Synthetic Construct
EKSQIK

SEQ ID NO: 11800 - protein, 6 aa, ARTIFICIAL SEQUENCE
  Synthetic Construct
EKSQLK

SEQ ID NO: 11801 - protein, 6 aa, ARTIFICIAL SEQUENCE
  Synthetic Construct
EKSQNK

SEQ ID NO: 11802 - protein, 6 aa, ARTIFICIAL SEQUENCE
  Synthetic Construct
EKSQQK

SEQ ID NO: 11803 - protein, 6 aa, ARTIFICIAL SEQUENCE
  Synthetic Construct
EKSQRK

SEQ ID NO: 11804 - protein, 6 aa, ARTIFICIAL SEQUENCE
  Synthetic Construct
EKSQSK

SEQ ID NO: 11805 - protein, 6 aa, ARTIFICIAL SEQUENCE
  Synthetic Construct
EKSQTK

SEQ ID NO: 11806 - protein, 6 aa, ARTIFICIAL SEQUENCE
  Synthetic Construct
EKSQYK

SEQ ID NO: 11807 - protein, 6 aa, ARTIFICIAL SEQUENCE
  Synthetic Construct
EKSRAK

SEQ ID NO: 11808 - protein, 6 aa, ARTIFICIAL SEQUENCE
  Synthetic Construct
EKSRDK

SEQ ID NO: 11809 - protein, 6 aa, ARTIFICIAL SEQUENCE
  Synthetic Construct
EKSREK

SEQ ID NO: 11810 - protein, 6 aa, ARTIFICIAL SEQUENCE
  Synthetic Construct
EKSRFK

SEQ ID NO: 11811 - protein, 6 aa, ARTIFICIAL SEQUENCE
  Synthetic Construct
EKSRGK

SEQ ID NO: 11812 - protein, 6 aa, ARTIFICIAL SEQUENCE
  Synthetic Construct
EKSRHK

SEQ ID NO: 11813 - protein, 6 aa, ARTIFICIAL SEQUENCE
  Synthetic Construct
EKSRIK

SEQ ID NO: 11814 - protein, 6 aa, ARTIFICIAL SEQUENCE
  Synthetic Construct
EKSRLK

SEQ ID NO: 11815 - protein, 6 aa, ARTIFICIAL SEQUENCE
  Synthetic Construct
EKSRNK

SEQ ID NO: 11816 - protein, 6 aa, ARTIFICIAL SEQUENCE
  Synthetic Construct
EKSRQK

SEQ ID NO: 11817 - protein, 6 aa, ARTIFICIAL SEQUENCE
  Synthetic Construct
EKSRRK

SEQ ID NO: 11818 - protein, 6 aa, ARTIFICIAL SEQUENCE
  Synthetic Construct
EKSRSK

SEQ ID NO: 11819 - protein, 6 aa, ARTIFICIAL SEQUENCE
  Synthetic Construct
EKSRTK

SEQ ID NO: 11820 - protein, 6 aa, ARTIFICIAL SEQUENCE
  Synthetic Construct
EKSRYK

SEQ ID NO: 11821 - protein, 6 aa, ARTIFICIAL SEQUENCE
  Synthetic Construct
EKSSAK

SEQ ID NO: 11822 - protein, 6 aa, ARTIFICIAL SEQUENCE
  Synthetic Construct
EKSSDK

SEQ ID NO: 11823 - protein, 6 aa, ARTIFICIAL SEQUENCE
  Synthetic Construct
EKSSEK

SEQ ID NO: 11824 - protein, 6 aa, ARTIFICIAL SEQUENCE
  Synthetic Construct
EKSSFK

SEQ ID NO: 11825 - protein, 6 aa, ARTIFICIAL SEQUENCE
  Synthetic Construct
EKSSGK

SEQ ID NO: 11826 - protein, 6 aa, ARTIFICIAL SEQUENCE
  Synthetic Construct
EKSSHK

SEQ ID NO: 11827 - protein, 6 aa, ARTIFICIAL SEQUENCE
  Synthetic Construct
EKSSIK

SEQ ID NO: 11828 - protein, 6 aa, ARTIFICIAL SEQUENCE
  Synthetic Construct
EKSSLK

SEQ ID NO: 11829 - protein, 6 aa, ARTIFICIAL SEQUENCE
  Synthetic Construct
EKSSNK

SEQ ID NO: 11830 - protein, 6 aa, ARTIFICIAL SEQUENCE
  Synthetic Construct
EKSSQK

SEQ ID NO: 11831 - protein, 6 aa, ARTIFICIAL SEQUENCE
  Synthetic Construct
EKSSRK

SEQ ID NO: 11832 - protein, 6 aa, ARTIFICIAL SEQUENCE
  Synthetic Construct
EKSSSK

SEQ ID NO: 11833 - protein, 6 aa, ARTIFICIAL SEQUENCE
  Synthetic Construct
EKSSTK

SEQ ID NO: 11834 - protein, 6 aa, ARTIFICIAL SEQUENCE
  Synthetic Construct
EKSSYK

SEQ ID NO: 11835 - protein, 6 aa, ARTIFICIAL SEQUENCE
  Synthetic Construct
EKSTAK

SEQ ID NO: 11836 - protein, 6 aa, ARTIFICIAL SEQUENCE
  Synthetic Construct
EKSTDK

SEQ ID NO: 11837 - protein, 6 aa, ARTIFICIAL SEQUENCE
  Synthetic Construct
EKSTEK

SEQ ID NO: 11838 - protein, 6 aa, ARTIFICIAL SEQUENCE
  Synthetic Construct
EKSTFK

SEQ ID NO: 11839 - protein, 6 aa, ARTIFICIAL SEQUENCE
  Synthetic Construct
EKSTGK

SEQ ID NO: 11840 - protein, 6 aa, ARTIFICIAL SEQUENCE
  Synthetic Construct
EKSTHK

SEQ ID NO: 11841 - protein, 6 aa, ARTIFICIAL SEQUENCE
  Synthetic Construct
EKSTIK

SEQ ID NO: 11842 - protein, 6 aa, ARTIFICIAL SEQUENCE
  Synthetic Construct
EKSTLK

SEQ ID NO: 11843 - protein, 6 aa, ARTIFICIAL SEQUENCE
  Synthetic Construct
EKSTNK

SEQ ID NO: 11844 - protein, 6 aa, ARTIFICIAL SEQUENCE
  Synthetic Construct
EKSTQK

SEQ ID NO: 11845 - protein, 6 aa, ARTIFICIAL SEQUENCE
  Synthetic Construct
EKSTRK

SEQ ID NO: 11846 - protein, 6 aa, ARTIFICIAL SEQUENCE
  Synthetic Construct
EKSTSK

SEQ ID NO: 11847 - protein, 6 aa, ARTIFICIAL SEQUENCE
  Synthetic Construct
EKSTTK

SEQ ID NO: 11848 - protein, 6 aa, ARTIFICIAL SEQUENCE
  Synthetic Construct
EKSTYK

SEQ ID NO: 11849 - protein, 6 aa, ARTIFICIAL SEQUENCE
  Synthetic Construct
EKSYAK

SEQ ID NO: 11850 - protein, 6 aa, ARTIFICIAL SEQUENCE
  Synthetic Construct
EKSYDK

SEQ ID NO: 11851 - protein, 6 aa, ARTIFICIAL SEQUENCE
  Synthetic Construct
EKSYEK

SEQ ID NO: 11852 - protein, 6 aa, ARTIFICIAL SEQUENCE
  Synthetic Construct
EKSYFK

SEQ ID NO: 11853 - protein, 6 aa, ARTIFICIAL SEQUENCE
  Synthetic Construct
EKSYGK

SEQ ID NO: 11854 - protein, 6 aa, ARTIFICIAL SEQUENCE
  Synthetic Construct
EKSYHK

SEQ ID NO: 11855 - protein, 6 aa, ARTIFICIAL SEQUENCE
  Synthetic Construct
EKSYIK

SEQ ID NO: 11856 - protein, 6 aa, ARTIFICIAL SEQUENCE
  Synthetic Construct
EKSYLK

SEQ ID NO: 11857 - protein, 6 aa, ARTIFICIAL SEQUENCE
  Synthetic Construct
EKSYNK

SEQ ID NO: 11858 - protein, 6 aa, ARTIFICIAL SEQUENCE
  Synthetic Construct
EKSYQK

SEQ ID NO: 11859 - protein, 6 aa, ARTIFICIAL SEQUENCE
  Synthetic Construct
EKSYRK

SEQ ID NO: 11860 - protein, 6 aa, ARTIFICIAL SEQUENCE
  Synthetic Construct
EKSYSK

SEQ ID NO: 11861 - protein, 6 aa, ARTIFICIAL SEQUENCE
  Synthetic Construct
EKSYTK

SEQ ID NO: 11862 - protein, 6 aa, ARTIFICIAL SEQUENCE
  Synthetic Construct
EKSYYK

SEQ ID NO: 11863 - protein, 6 aa, ARTIFICIAL SEQUENCE
  Synthetic Construct
EKTAAK

SEQ ID NO: 11864 - protein, 6 aa, ARTIFICIAL SEQUENCE
  Synthetic Construct
EKTADK

SEQ ID NO: 11865 - protein, 6 aa, ARTIFICIAL SEQUENCE
  Synthetic Construct
EKTAEK

SEQ ID NO: 11866 - protein, 6 aa, ARTIFICIAL SEQUENCE
  Synthetic Construct
EKTAFK

SEQ ID NO: 11867 - protein, 6 aa, ARTIFICIAL SEQUENCE
  Synthetic Construct
EKTAGK

SEQ ID NO: 11868 - protein, 6 aa, ARTIFICIAL SEQUENCE
  Synthetic Construct
EKTAHK

SEQ ID NO: 11869 - protein, 6 aa, ARTIFICIAL SEQUENCE
  Synthetic Construct
EKTAIK

SEQ ID NO: 11870 - protein, 6 aa, ARTIFICIAL SEQUENCE
  Synthetic Construct
EKTALK

SEQ ID NO: 11871 - protein, 6 aa, ARTIFICIAL SEQUENCE
  Synthetic Construct
EKTANK

SEQ ID NO: 11872 - protein, 6 aa, ARTIFICIAL SEQUENCE
  Synthetic Construct
EKTAQK

SEQ ID NO: 11873 - protein, 6 aa, ARTIFICIAL SEQUENCE
  Synthetic Construct
EKTARK

SEQ ID NO: 11874 - protein, 6 aa, ARTIFICIAL SEQUENCE
  Synthetic Construct
EKTASK

SEQ ID NO: 11875 - protein, 6 aa, ARTIFICIAL SEQUENCE
  Synthetic Construct
EKTATK

SEQ ID NO: 11876 - protein, 6 aa, ARTIFICIAL SEQUENCE
  Synthetic Construct
EKTAYK

SEQ ID NO: 11877 - protein, 6 aa, ARTIFICIAL SEQUENCE
  Synthetic Construct
EKTDAK

SEQ ID NO: 11878 - protein, 6 aa, ARTIFICIAL SEQUENCE
  Synthetic Construct
EKTDDK

SEQ ID NO: 11879 - protein, 6 aa, ARTIFICIAL SEQUENCE
  Synthetic Construct
EKTDEK

SEQ ID NO: 11880 - protein, 6 aa, ARTIFICIAL SEQUENCE
  Synthetic Construct
EKTDFK

SEQ ID NO: 11881 - protein, 6 aa, ARTIFICIAL SEQUENCE
  Synthetic Construct
EKTDGK

SEQ ID NO: 11882 - protein, 6 aa, ARTIFICIAL SEQUENCE
  Synthetic Construct
EKTDHK

SEQ ID NO: 11883 - protein, 6 aa, ARTIFICIAL SEQUENCE
  Synthetic Construct
EKTDIK

SEQ ID NO: 11884 - protein, 6 aa, ARTIFICIAL SEQUENCE
  Synthetic Construct
EKTDLK

SEQ ID NO: 11885 - protein, 6 aa, ARTIFICIAL SEQUENCE
  Synthetic Construct
EKTDNK

SEQ ID NO: 11886 - protein, 6 aa, ARTIFICIAL SEQUENCE
  Synthetic Construct
EKTDQK

SEQ ID NO: 11887 - protein, 6 aa, ARTIFICIAL SEQUENCE
  Synthetic Construct
EKTDRK

SEQ ID NO: 11888 - protein, 6 aa, ARTIFICIAL SEQUENCE
  Synthetic Construct
EKTDSK

SEQ ID NO: 11889 - protein, 6 aa, ARTIFICIAL SEQUENCE
  Synthetic Construct
EKTDTK

SEQ ID NO: 11890 - protein, 6 aa, ARTIFICIAL SEQUENCE
  Synthetic Construct
EKTDYK

SEQ ID NO: 11891 - protein, 6 aa, ARTIFICIAL SEQUENCE
  Synthetic Construct
EKTEAK

SEQ ID NO: 11892 - protein, 6 aa, ARTIFICIAL SEQUENCE
  Synthetic Construct
EKTEDK

SEQ ID NO: 11893 - protein, 6 aa, ARTIFICIAL SEQUENCE
  Synthetic Construct
EKTEEK

SEQ ID NO: 11894 - protein, 6 aa, ARTIFICIAL SEQUENCE
  Synthetic Construct
EKTEFK

SEQ ID NO: 11895 - protein, 6 aa, ARTIFICIAL SEQUENCE
  Synthetic Construct
EKTEGK

SEQ ID NO: 11896 - protein, 6 aa, ARTIFICIAL SEQUENCE
  Synthetic Construct
EKTEHK

SEQ ID NO: 11897 - protein, 6 aa, ARTIFICIAL SEQUENCE
  Synthetic Construct
EKTEIK

SEQ ID NO: 11898 - protein, 6 aa, ARTIFICIAL SEQUENCE
  Synthetic Construct
EKTELK

SEQ ID NO: 11899 - protein, 6 aa, ARTIFICIAL SEQUENCE
  Synthetic Construct
EKTENK

SEQ ID NO: 11900 - protein, 6 aa, ARTIFICIAL SEQUENCE
  Synthetic Construct
EKTEQK

SEQ ID NO: 11901 - protein, 6 aa, ARTIFICIAL SEQUENCE
  Synthetic Construct
EKTERK

SEQ ID NO: 11902 - protein, 6 aa, ARTIFICIAL SEQUENCE
  Synthetic Construct
EKTESK

SEQ ID NO: 11903 - protein, 6 aa, ARTIFICIAL SEQUENCE
  Synthetic Construct
EKTETK

SEQ ID NO: 11904 - protein, 6 aa, ARTIFICIAL SEQUENCE
  Synthetic Construct
EKTEYK

SEQ ID NO: 11905 - protein, 6 aa, ARTIFICIAL SEQUENCE
  Synthetic Construct
EKTFAK

SEQ ID NO: 11906 - protein, 6 aa, ARTIFICIAL SEQUENCE
  Synthetic Construct
EKTFDK

SEQ ID NO: 11907 - protein, 6 aa, ARTIFICIAL SEQUENCE
  Synthetic Construct
EKTFEK

SEQ ID NO: 11908 - protein, 6 aa, ARTIFICIAL SEQUENCE
  Synthetic Construct
EKTFFK

SEQ ID NO: 11909 - protein, 6 aa, ARTIFICIAL SEQUENCE
  Synthetic Construct
EKTFGK

SEQ ID NO: 11910 - protein, 6 aa, ARTIFICIAL SEQUENCE
  Synthetic Construct
EKTFHK

SEQ ID NO: 11911 - protein, 6 aa, ARTIFICIAL SEQUENCE
  Synthetic Construct
EKTFIK

SEQ ID NO: 11912 - protein, 6 aa, ARTIFICIAL SEQUENCE
  Synthetic Construct
EKTFLK

SEQ ID NO: 11913 - protein, 6 aa, ARTIFICIAL SEQUENCE
  Synthetic Construct
EKTFNK

SEQ ID NO: 11914 - protein, 6 aa, ARTIFICIAL SEQUENCE
  Synthetic Construct
EKTFQK

SEQ ID NO: 11915 - protein, 6 aa, ARTIFICIAL SEQUENCE
  Synthetic Construct
EKTFRK

SEQ ID NO: 11916 - protein, 6 aa, ARTIFICIAL SEQUENCE
  Synthetic Construct
EKTFSK

SEQ ID NO: 11917 - protein, 6 aa, ARTIFICIAL SEQUENCE
  Synthetic Construct
EKTFTK

SEQ ID NO: 11918 - protein, 6 aa, ARTIFICIAL SEQUENCE
  Synthetic Construct
EKTFYK

SEQ ID NO: 11919 - protein, 6 aa, ARTIFICIAL SEQUENCE
  Synthetic Construct
EKTGAK

SEQ ID NO: 11920 - protein, 6 aa, ARTIFICIAL SEQUENCE
  Synthetic Construct
EKTGDK

SEQ ID NO: 11921 - protein, 6 aa, ARTIFICIAL SEQUENCE
  Synthetic Construct
EKTGEK

SEQ ID NO: 11922 - protein, 6 aa, ARTIFICIAL SEQUENCE
  Synthetic Construct
EKTGFK

SEQ ID NO: 11923 - protein, 6 aa, ARTIFICIAL SEQUENCE
  Synthetic Construct
EKTGGK

SEQ ID NO: 11924 - protein, 6 aa, ARTIFICIAL SEQUENCE
  Synthetic Construct
EKTGHK

SEQ ID NO: 11925 - protein, 6 aa, ARTIFICIAL SEQUENCE
  Synthetic Construct
EKTGIK

SEQ ID NO: 11926 - protein, 6 aa, ARTIFICIAL SEQUENCE
  Synthetic Construct
EKTGLK

SEQ ID NO: 11927 - protein, 6 aa, ARTIFICIAL SEQUENCE
  Synthetic Construct
EKTGNK

SEQ ID NO: 11928 - protein, 6 aa, ARTIFICIAL SEQUENCE
  Synthetic Construct
EKTGQK

SEQ ID NO: 11929 - protein, 6 aa, ARTIFICIAL SEQUENCE
  Synthetic Construct
EKTGRK

SEQ ID NO: 11930 - protein, 6 aa, ARTIFICIAL SEQUENCE
  Synthetic Construct
EKTGSK

SEQ ID NO: 11931 - protein, 6 aa, ARTIFICIAL SEQUENCE
  Synthetic Construct
EKTGTK

SEQ ID NO: 11932 - protein, 6 aa, ARTIFICIAL SEQUENCE
  Synthetic Construct
EKTGYK

SEQ ID NO: 11933 - protein, 6 aa, ARTIFICIAL SEQUENCE
  Synthetic Construct
EKTHAK

SEQ ID NO: 11934 - protein, 6 aa, ARTIFICIAL SEQUENCE
  Synthetic Construct
EKTHDK

SEQ ID NO: 11935 - protein, 6 aa, ARTIFICIAL SEQUENCE
  Synthetic Construct
EKTHEK

SEQ ID NO: 11936 - protein, 6 aa, ARTIFICIAL SEQUENCE
  Synthetic Construct
EKTHFK

SEQ ID NO: 11937 - protein, 6 aa, ARTIFICIAL SEQUENCE
  Synthetic Construct
EKTHGK

SEQ ID NO: 11938 - protein, 6 aa, ARTIFICIAL SEQUENCE
  Synthetic Construct
EKTHHK

SEQ ID NO: 11939 - protein, 6 aa, ARTIFICIAL SEQUENCE
  Synthetic Construct
EKTHIK

SEQ ID NO: 11940 - protein, 6 aa, ARTIFICIAL SEQUENCE
  Synthetic Construct
EKTHLK

SEQ ID NO: 11941 - protein, 6 aa, ARTIFICIAL SEQUENCE
  Synthetic Construct
EKTHNK

SEQ ID NO: 11942 - protein, 6 aa, ARTIFICIAL SEQUENCE
  Synthetic Construct
EKTHQK

SEQ ID NO: 11943 - protein, 6 aa, ARTIFICIAL SEQUENCE
  Synthetic Construct
EKTHRK

SEQ ID NO: 11944 - protein, 6 aa, ARTIFICIAL SEQUENCE
  Synthetic Construct
EKTHSK

SEQ ID NO: 11945 - protein, 6 aa, ARTIFICIAL SEQUENCE
  Synthetic Construct
EKTHTK

SEQ ID NO: 11946 - protein, 6 aa, ARTIFICIAL SEQUENCE
  Synthetic Construct
EKTHYK

SEQ ID NO: 11947 - protein, 6 aa, ARTIFICIAL SEQUENCE
  Synthetic Construct
EKTIAK

SEQ ID NO: 11948 - protein, 6 aa, ARTIFICIAL SEQUENCE
  Synthetic Construct
EKTIDK

SEQ ID NO: 11949 - protein, 6 aa, ARTIFICIAL SEQUENCE
  Synthetic Construct
EKTIEK

SEQ ID NO: 11950 - protein, 6 aa, ARTIFICIAL SEQUENCE
  Synthetic Construct
EKTIFK

SEQ ID NO: 11951 - protein, 6 aa, ARTIFICIAL SEQUENCE
  Synthetic Construct
EKTIGK

SEQ ID NO: 11952 - protein, 6 aa, ARTIFICIAL SEQUENCE
  Synthetic Construct
EKTIHK

SEQ ID NO: 11953 - protein, 6 aa, ARTIFICIAL SEQUENCE
  Synthetic Construct
EKTIIK

SEQ ID NO: 11954 - protein, 6 aa, ARTIFICIAL SEQUENCE
  Synthetic Construct
EKTILK

SEQ ID NO: 11955 - protein, 6 aa, ARTIFICIAL SEQUENCE
  Synthetic Construct
EKTINK

SEQ ID NO: 11956 - protein, 6 aa, ARTIFICIAL SEQUENCE
  Synthetic Construct
EKTIQK

SEQ ID NO: 11957 - protein, 6 aa, ARTIFICIAL SEQUENCE
  Synthetic Construct
EKTIRK

SEQ ID NO: 11958 - protein, 6 aa, ARTIFICIAL SEQUENCE
  Synthetic Construct
EKTISK

SEQ ID NO: 11959 - protein, 6 aa, ARTIFICIAL SEQUENCE
  Synthetic Construct
EKTITK

SEQ ID NO: 11960 - protein, 6 aa, ARTIFICIAL SEQUENCE
  Synthetic Construct
EKTIYK

SEQ ID NO: 11961 - protein, 6 aa, ARTIFICIAL SEQUENCE
  Synthetic Construct
EKTLAK

SEQ ID NO: 11962 - protein, 6 aa, ARTIFICIAL SEQUENCE
  Synthetic Construct
EKTLDK

SEQ ID NO: 11963 - protein, 6 aa, ARTIFICIAL SEQUENCE
  Synthetic Construct
EKTLEK

SEQ ID NO: 11964 - protein, 6 aa, ARTIFICIAL SEQUENCE
  Synthetic Construct
EKTLFK

SEQ ID NO: 11965 - protein, 6 aa, ARTIFICIAL SEQUENCE
  Synthetic Construct
EKTLGK

SEQ ID NO: 11966 - protein, 6 aa, ARTIFICIAL SEQUENCE
  Synthetic Construct
EKTLHK

SEQ ID NO: 11967 - protein, 6 aa, ARTIFICIAL SEQUENCE
  Synthetic Construct
EKTLIK

SEQ ID NO: 11968 - protein, 6 aa, ARTIFICIAL SEQUENCE
  Synthetic Construct
EKTLLK

SEQ ID NO: 11969 - protein, 6 aa, ARTIFICIAL SEQUENCE
  Synthetic Construct
EKTLNK

SEQ ID NO: 11970 - protein, 6 aa, ARTIFICIAL SEQUENCE
  Synthetic Construct
EKTLQK

SEQ ID NO: 11971 - protein, 6 aa, ARTIFICIAL SEQUENCE
  Synthetic Construct
EKTLRK

SEQ ID NO: 11972 - protein, 6 aa, ARTIFICIAL SEQUENCE
  Synthetic Construct
EKTLSK

SEQ ID NO: 11973 - protein, 6 aa, ARTIFICIAL SEQUENCE
  Synthetic Construct
EKTLTK

SEQ ID NO: 11974 - protein, 6 aa, ARTIFICIAL SEQUENCE
  Synthetic Construct
EKTLYK

SEQ ID NO: 11975 - protein, 6 aa, ARTIFICIAL SEQUENCE
  Synthetic Construct
EKTNAK

SEQ ID NO: 11976 - protein, 6 aa, ARTIFICIAL SEQUENCE
  Synthetic Construct
EKTNDK

SEQ ID NO: 11977 - protein, 6 aa, ARTIFICIAL SEQUENCE
  Synthetic Construct
EKTNEK

SEQ ID NO: 11978 - protein, 6 aa, ARTIFICIAL SEQUENCE
  Synthetic Construct
EKTNFK

SEQ ID NO: 11979 - protein, 6 aa, ARTIFICIAL SEQUENCE
  Synthetic Construct
EKTNGK

SEQ ID NO: 11980 - protein, 6 aa, ARTIFICIAL SEQUENCE
  Synthetic Construct
EKTNHK

SEQ ID NO: 11981 - protein, 6 aa, ARTIFICIAL SEQUENCE
  Synthetic Construct
EKTNIK

SEQ ID NO: 11982 - protein, 6 aa, ARTIFICIAL SEQUENCE
  Synthetic Construct
EKTNLK

SEQ ID NO: 11983 - protein, 6 aa, ARTIFICIAL SEQUENCE
  Synthetic Construct
EKTNNK

SEQ ID NO: 11984 - protein, 6 aa, ARTIFICIAL SEQUENCE
  Synthetic Construct
EKTNQK

SEQ ID NO: 11985 - protein, 6 aa, ARTIFICIAL SEQUENCE
  Synthetic Construct
EKTNRK

SEQ ID NO: 11986 - protein, 6 aa, ARTIFICIAL SEQUENCE
  Synthetic Construct
EKTNSK

SEQ ID NO: 11987 - protein, 6 aa, ARTIFICIAL SEQUENCE
  Synthetic Construct
EKTNTK

SEQ ID NO: 11988 - protein, 6 aa, ARTIFICIAL SEQUENCE
  Synthetic Construct
EKTNYK

SEQ ID NO: 11989 - protein, 6 aa, ARTIFICIAL SEQUENCE
  Synthetic Construct
EKTQAK

SEQ ID NO: 11990 - protein, 6 aa, ARTIFICIAL SEQUENCE
  Synthetic Construct
EKTQDK

SEQ ID NO: 11991 - protein, 6 aa, ARTIFICIAL SEQUENCE
  Synthetic Construct
EKTQEK

SEQ ID NO: 11992 - protein, 6 aa, ARTIFICIAL SEQUENCE
  Synthetic Construct
EKTQFK

SEQ ID NO: 11993 - protein, 6 aa, ARTIFICIAL SEQUENCE
  Synthetic Construct
EKTQGK

SEQ ID NO: 11994 - protein, 6 aa, ARTIFICIAL SEQUENCE
  Synthetic Construct
EKTQHK

SEQ ID NO: 11995 - protein, 6 aa, ARTIFICIAL SEQUENCE
  Synthetic Construct
EKTQIK

SEQ ID NO: 11996 - protein, 6 aa, ARTIFICIAL SEQUENCE
  Synthetic Construct
EKTQLK

SEQ ID NO: 11997 - protein, 6 aa, ARTIFICIAL SEQUENCE
  Synthetic Construct
EKTQNK

SEQ ID NO: 11998 - protein, 6 aa, ARTIFICIAL SEQUENCE
  Synthetic Construct
EKTQQK

SEQ ID NO: 11999 - protein, 6 aa, ARTIFICIAL SEQUENCE
  Synthetic Construct
EKTQRK

SEQ ID NO: 12000 - protein, 6 aa, ARTIFICIAL SEQUENCE
  Synthetic Construct
EKTQSK

SEQ ID NO: 12001 - protein, 6 aa, ARTIFICIAL SEQUENCE
  Synthetic Construct
EKTQTK

SEQ ID NO: 12002 - protein, 6 aa, ARTIFICIAL SEQUENCE
  Synthetic Construct
EKTQYK

SEQ ID NO: 12003 - protein, 6 aa, ARTIFICIAL SEQUENCE
  Synthetic Construct
EKTRAK

SEQ ID NO: 12004 - protein, 6 aa, ARTIFICIAL SEQUENCE
  Synthetic Construct
EKTRDK

SEQ ID NO: 12005 - protein, 6 aa, ARTIFICIAL SEQUENCE
  Synthetic Construct
EKTREK

SEQ ID NO: 12006 - protein, 6 aa, ARTIFICIAL SEQUENCE
  Synthetic Construct
EKTRFK

SEQ ID NO: 12007 - protein, 6 aa, ARTIFICIAL SEQUENCE
  Synthetic Construct
EKTRGK

SEQ ID NO: 12008 - protein, 6 aa, ARTIFICIAL SEQUENCE
  Synthetic Construct
EKTRHK

SEQ ID NO: 12009 - protein, 6 aa, ARTIFICIAL SEQUENCE
  Synthetic Construct
EKTRIK

SEQ ID NO: 12010 - protein, 6 aa, ARTIFICIAL SEQUENCE
  Synthetic Construct
EKTRLK

SEQ ID NO: 12011 - protein, 6 aa, ARTIFICIAL SEQUENCE
  Synthetic Construct
EKTRNK

SEQ ID NO: 12012 - protein, 6 aa, ARTIFICIAL SEQUENCE
  Synthetic Construct
EKTRQK

SEQ ID NO: 12013 - protein, 6 aa, ARTIFICIAL SEQUENCE
  Synthetic Construct
EKTRRK

SEQ ID NO: 12014 - protein, 6 aa, ARTIFICIAL SEQUENCE
  Synthetic Construct
EKTRSK

SEQ ID NO: 12015 - protein, 6 aa, ARTIFICIAL SEQUENCE
  Synthetic Construct
EKTRTK

SEQ ID NO: 12016 - protein, 6 aa, ARTIFICIAL SEQUENCE
  Synthetic Construct
EKTRYK

SEQ ID NO: 12017 - protein, 6 aa, ARTIFICIAL SEQUENCE
  Synthetic Construct
EKTSAK

SEQ ID NO: 12018 - protein, 6 aa, ARTIFICIAL SEQUENCE
  Synthetic Construct
EKTSDK

SEQ ID NO: 12019 - protein, 6 aa, ARTIFICIAL SEQUENCE
  Synthetic Construct
EKTSEK

SEQ ID NO: 12020 - protein, 6 aa, ARTIFICIAL SEQUENCE
  Synthetic Construct
EKTSFK

SEQ ID NO: 12021 - protein, 6 aa, ARTIFICIAL SEQUENCE
  Synthetic Construct
EKTSGK

SEQ ID NO: 12022 - protein, 6 aa, ARTIFICIAL SEQUENCE
  Synthetic Construct
EKTSHK

SEQ ID NO: 12023 - protein, 6 aa, ARTIFICIAL SEQUENCE
  Synthetic Construct
EKTSIK

SEQ ID NO: 12024 - protein, 6 aa, ARTIFICIAL SEQUENCE
  Synthetic Construct
EKTSLK

SEQ ID NO: 12025 - protein, 6 aa, ARTIFICIAL SEQUENCE
  Synthetic Construct
EKTSNK

SEQ ID NO: 12026 - protein, 6 aa, ARTIFICIAL SEQUENCE
  Synthetic Construct
EKTSQK

SEQ ID NO: 12027 - protein, 6 aa, ARTIFICIAL SEQUENCE
  Synthetic Construct
EKTSRK

SEQ ID NO: 12028 - protein, 6 aa, ARTIFICIAL SEQUENCE
  Synthetic Construct
EKTSSK

SEQ ID NO: 12029 - protein, 6 aa, ARTIFICIAL SEQUENCE
  Synthetic Construct
EKTSTK

SEQ ID NO: 12030 - protein, 6 aa, ARTIFICIAL SEQUENCE
  Synthetic Construct
EKTSYK

SEQ ID NO: 12031 - protein, 6 aa, ARTIFICIAL SEQUENCE
  Synthetic Construct
EKTTAK

SEQ ID NO: 12032 - protein, 6 aa, ARTIFICIAL SEQUENCE
  Synthetic Construct
EKTTDK

SEQ ID NO: 12033 - protein, 6 aa, ARTIFICIAL SEQUENCE
  Synthetic Construct
EKTTEK

SEQ ID NO: 12034 - protein, 6 aa, ARTIFICIAL SEQUENCE
  Synthetic Construct
EKTTFK

SEQ ID NO: 12035 - protein, 6 aa, ARTIFICIAL SEQUENCE
  Synthetic Construct
EKTTGK

SEQ ID NO: 12036 - protein, 6 aa, ARTIFICIAL SEQUENCE
  Synthetic Construct
EKTTHK

SEQ ID NO: 12037 - protein, 6 aa, ARTIFICIAL SEQUENCE
  Synthetic Construct
EKTTIK

SEQ ID NO: 12038 - protein, 6 aa, ARTIFICIAL SEQUENCE
  Synthetic Construct
EKTTLK

SEQ ID NO: 12039 - protein, 6 aa, ARTIFICIAL SEQUENCE
  Synthetic Construct
EKTTNK

SEQ ID NO: 12040 - protein, 6 aa, ARTIFICIAL SEQUENCE
  Synthetic Construct
EKTTQK

SEQ ID NO: 12041 - protein, 6 aa, ARTIFICIAL SEQUENCE
  Synthetic Construct
EKTTRK

SEQ ID NO: 12042 - protein, 6 aa, ARTIFICIAL SEQUENCE
  Synthetic Construct
EKTTSK

SEQ ID NO: 12043 - protein, 6 aa, ARTIFICIAL SEQUENCE
  Synthetic Construct
EKTTTK

SEQ ID NO: 12044 - protein, 6 aa, ARTIFICIAL SEQUENCE
  Synthetic Construct
EKTTYK

SEQ ID NO: 12045 - protein, 6 aa, ARTIFICIAL SEQUENCE
  Synthetic Construct
EKTYAK

SEQ ID NO: 12046 - protein, 6 aa, ARTIFICIAL SEQUENCE
  Synthetic Construct
EKTYDK

SEQ ID NO: 12047 - protein, 6 aa, ARTIFICIAL SEQUENCE
  Synthetic Construct
EKTYEK

SEQ ID NO: 12048 - protein, 6 aa, ARTIFICIAL SEQUENCE
  Synthetic Construct
EKTYFK

SEQ ID NO: 12049 - protein, 6 aa, ARTIFICIAL SEQUENCE
  Synthetic Construct
EKTYGK

SEQ ID NO: 12050 - protein, 6 aa, ARTIFICIAL SEQUENCE
  Synthetic Construct
EKTYHK

SEQ ID NO: 12051 - protein, 6 aa, ARTIFICIAL SEQUENCE
  Synthetic Construct
EKTYIK

SEQ ID NO: 12052 - protein, 6 aa, ARTIFICIAL SEQUENCE
  Synthetic Construct
EKTYLK

SEQ ID NO: 12053 - protein, 6 aa, ARTIFICIAL SEQUENCE
  Synthetic Construct
EKTYNK

SEQ ID NO: 12054 - protein, 6 aa, ARTIFICIAL SEQUENCE
  Synthetic Construct
EKTYQK

SEQ ID NO: 12055 - protein, 6 aa, ARTIFICIAL SEQUENCE
  Synthetic Construct
EKTYRK

SEQ ID NO: 12056 - protein, 6 aa, ARTIFICIAL SEQUENCE
  Synthetic Construct
EKTYSK

SEQ ID NO: 12057 - protein, 6 aa, ARTIFICIAL SEQUENCE
  Synthetic Construct
EKTYTK

SEQ ID NO: 12058 - protein, 6 aa, ARTIFICIAL SEQUENCE
  Synthetic Construct
EKTYYK

SEQ ID NO: 12059 - protein, 6 aa, ARTIFICIAL SEQUENCE
  Synthetic Construct
EKYAAK

SEQ ID NO: 12060 - protein, 6 aa, ARTIFICIAL SEQUENCE
  Synthetic Construct
EKYADK

SEQ ID NO: 12061 - protein, 6 aa, ARTIFICIAL SEQUENCE
  Synthetic Construct
EKYAEK

SEQ ID NO: 12062 - protein, 6 aa, ARTIFICIAL SEQUENCE
  Synthetic Construct
EKYAFK

SEQ ID NO: 12063 - protein, 6 aa, ARTIFICIAL SEQUENCE
  Synthetic Construct
EKYAGK

SEQ ID NO: 12064 - protein, 6 aa, ARTIFICIAL SEQUENCE
  Synthetic Construct
EKYAHK

SEQ ID NO: 12065 - protein, 6 aa, ARTIFICIAL SEQUENCE
  Synthetic Construct
EKYAIK

SEQ ID NO: 12066 - protein, 6 aa, ARTIFICIAL SEQUENCE
  Synthetic Construct
EKYALK

SEQ ID NO: 12067 - protein, 6 aa, ARTIFICIAL SEQUENCE
  Synthetic Construct
EKYANK

SEQ ID NO: 12068 - protein, 6 aa, ARTIFICIAL SEQUENCE
  Synthetic Construct
EKYAQK

SEQ ID NO: 12069 - protein, 6 aa, ARTIFICIAL SEQUENCE
  Synthetic Construct
EKYARK

SEQ ID NO: 12070 - protein, 6 aa, ARTIFICIAL SEQUENCE
  Synthetic Construct
EKYASK

SEQ ID NO: 12071 - protein, 6 aa, ARTIFICIAL SEQUENCE
  Synthetic Construct
EKYATK

SEQ ID NO: 12072 - protein, 6 aa, ARTIFICIAL SEQUENCE
  Synthetic Construct
EKYAYK

SEQ ID NO: 12073 - protein, 6 aa, ARTIFICIAL SEQUENCE
  Synthetic Construct
EKYDAK

SEQ ID NO: 12074 - protein, 6 aa, ARTIFICIAL SEQUENCE
  Synthetic Construct
EKYDDK

SEQ ID NO: 12075 - protein, 6 aa, ARTIFICIAL SEQUENCE
  Synthetic Construct
EKYDEK

SEQ ID NO: 12076 - protein, 6 aa, ARTIFICIAL SEQUENCE
  Synthetic Construct
EKYDFK

SEQ ID NO: 12077 - protein, 6 aa, ARTIFICIAL SEQUENCE
  Synthetic Construct
EKYDGK

SEQ ID NO: 12078 - protein, 6 aa, ARTIFICIAL SEQUENCE
  Synthetic Construct
EKYDHK

SEQ ID NO: 12079 - protein, 6 aa, ARTIFICIAL SEQUENCE
  Synthetic Construct
EKYDIK

SEQ ID NO: 12080 - protein, 6 aa, ARTIFICIAL SEQUENCE
  Synthetic Construct
EKYDLK

SEQ ID NO: 12081 - protein, 6 aa, ARTIFICIAL SEQUENCE
  Synthetic Construct
EKYDNK

SEQ ID NO: 12082 - protein, 6 aa, ARTIFICIAL SEQUENCE
  Synthetic Construct
EKYDQK

SEQ ID NO: 12083 - protein, 6 aa, ARTIFICIAL SEQUENCE
  Synthetic Construct
EKYDRK

SEQ ID NO: 12084 - protein, 6 aa, ARTIFICIAL SEQUENCE
  Synthetic Construct
EKYDSK

SEQ ID NO: 12085 - protein, 6 aa, ARTIFICIAL SEQUENCE
  Synthetic Construct
EKYDTK

SEQ ID NO: 12086 - protein, 6 aa, ARTIFICIAL SEQUENCE
  Synthetic Construct
EKYDYK

SEQ ID NO: 12087 - protein, 6 aa, ARTIFICIAL SEQUENCE
  Synthetic Construct
EKYEAK

SEQ ID NO: 12088 - protein, 6 aa, ARTIFICIAL SEQUENCE
  Synthetic Construct
EKYEDK

SEQ ID NO: 12089 - protein, 6 aa, ARTIFICIAL SEQUENCE
  Synthetic Construct
EKYEEK

SEQ ID NO: 12090 - protein, 6 aa, ARTIFICIAL SEQUENCE
  Synthetic Construct
EKYEFK

SEQ ID NO: 12091 - protein, 6 aa, ARTIFICIAL SEQUENCE
  Synthetic Construct
EKYEGK

SEQ ID NO: 12092 - protein, 6 aa, ARTIFICIAL SEQUENCE
  Synthetic Construct
EKYEHK

SEQ ID NO: 12093 - protein, 6 aa, ARTIFICIAL SEQUENCE
  Synthetic Construct
EKYEIK

SEQ ID NO: 12094 - protein, 6 aa, ARTIFICIAL SEQUENCE
  Synthetic Construct
EKYELK

SEQ ID NO: 12095 - protein, 6 aa, ARTIFICIAL SEQUENCE
  Synthetic Construct
EKYENK

SEQ ID NO: 12096 - protein, 6 aa, ARTIFICIAL SEQUENCE
  Synthetic Construct
EKYEQK

SEQ ID NO: 12097 - protein, 6 aa, ARTIFICIAL SEQUENCE
  Synthetic Construct
EKYERK

SEQ ID NO: 12098 - protein, 6 aa, ARTIFICIAL SEQUENCE
  Synthetic Construct
EKYESK

SEQ ID NO: 12099 - protein, 6 aa, ARTIFICIAL SEQUENCE
  Synthetic Construct
EKYETK

SEQ ID NO: 12100 - protein, 6 aa, ARTIFICIAL SEQUENCE
  Synthetic Construct
EKYEYK

SEQ ID NO: 12101 - protein, 6 aa, ARTIFICIAL SEQUENCE
  Synthetic Construct
EKYFAK

SEQ ID NO: 12102 - protein, 6 aa, ARTIFICIAL SEQUENCE
  Synthetic Construct
EKYFDK

SEQ ID NO: 12103 - protein, 6 aa, ARTIFICIAL SEQUENCE
  Synthetic Construct
EKYFEK

SEQ ID NO: 12104 - protein, 6 aa, ARTIFICIAL SEQUENCE
  Synthetic Construct
EKYFFK

SEQ ID NO: 12105 - protein, 6 aa, ARTIFICIAL SEQUENCE
  Synthetic Construct
EKYFGK

SEQ ID NO: 12106 - protein, 6 aa, ARTIFICIAL SEQUENCE
  Synthetic Construct
EKYFHK

SEQ ID NO: 12107 - protein, 6 aa, ARTIFICIAL SEQUENCE
  Synthetic Construct
EKYFIK

SEQ ID NO: 12108 - protein, 6 aa, ARTIFICIAL SEQUENCE
  Synthetic Construct
EKYFLK

SEQ ID NO: 12109 - protein, 6 aa, ARTIFICIAL SEQUENCE
  Synthetic Construct
EKYFNK

SEQ ID NO: 12110 - protein, 6 aa, ARTIFICIAL SEQUENCE
  Synthetic Construct
EKYFQK

SEQ ID NO: 12111 - protein, 6 aa, ARTIFICIAL SEQUENCE
  Synthetic Construct
EKYFRK

SEQ ID NO: 12112 - protein, 6 aa, ARTIFICIAL SEQUENCE
  Synthetic Construct
EKYFSK

SEQ ID NO: 12113 - protein, 6 aa, ARTIFICIAL SEQUENCE
  Synthetic Construct
EKYFTK

SEQ ID NO: 12114 - protein, 6 aa, ARTIFICIAL SEQUENCE
  Synthetic Construct
EKYFYK

SEQ ID NO: 12115 - protein, 6 aa, ARTIFICIAL SEQUENCE
  Synthetic Construct
EKYGAK

SEQ ID NO: 12116 - protein, 6 aa, ARTIFICIAL SEQUENCE
  Synthetic Construct
EKYGDK

SEQ ID NO: 12117 - protein, 6 aa, ARTIFICIAL SEQUENCE
  Synthetic Construct
EKYGEK

SEQ ID NO: 12118 - protein, 6 aa, ARTIFICIAL SEQUENCE
  Synthetic Construct
EKYGFK

SEQ ID NO: 12119 - protein, 6 aa, ARTIFICIAL SEQUENCE
  Synthetic Construct
EKYGGK

SEQ ID NO: 12120 - protein, 6 aa, ARTIFICIAL SEQUENCE
  Synthetic Construct
EKYGHK

SEQ ID NO: 12121 - protein, 6 aa, ARTIFICIAL SEQUENCE
  Synthetic Construct
EKYGIK

SEQ ID NO: 12122 - protein, 6 aa, ARTIFICIAL SEQUENCE
  Synthetic Construct
EKYGLK

SEQ ID NO: 12123 - protein, 6 aa, ARTIFICIAL SEQUENCE
  Synthetic Construct
EKYGNK

SEQ ID NO: 12124 - protein, 6 aa, ARTIFICIAL SEQUENCE
  Synthetic Construct
EKYGQK

SEQ ID NO: 12125 - protein, 6 aa, ARTIFICIAL SEQUENCE
  Synthetic Construct
EKYGRK

SEQ ID NO: 12126 - protein, 6 aa, ARTIFICIAL SEQUENCE
  Synthetic Construct
EKYGSK

SEQ ID NO: 12127 - protein, 6 aa, ARTIFICIAL SEQUENCE
  Synthetic Construct
EKYGTK

SEQ ID NO: 12128 - protein, 6 aa, ARTIFICIAL SEQUENCE
  Synthetic Construct
EKYGYK

SEQ ID NO: 12129 - protein, 6 aa, ARTIFICIAL SEQUENCE
  Synthetic Construct
EKYHAK

SEQ ID NO: 12130 - protein, 6 aa, ARTIFICIAL SEQUENCE
  Synthetic Construct
EKYHDK

SEQ ID NO: 12131 - protein, 6 aa, ARTIFICIAL SEQUENCE
  Synthetic Construct
EKYHEK

SEQ ID NO: 12132 - protein, 6 aa, ARTIFICIAL SEQUENCE
  Synthetic Construct
EKYHFK

SEQ ID NO: 12133 - protein, 6 aa, ARTIFICIAL SEQUENCE
  Synthetic Construct
EKYHGK

SEQ ID NO: 12134 - protein, 6 aa, ARTIFICIAL SEQUENCE
  Synthetic Construct
EKYHHK

SEQ ID NO: 12135 - protein, 6 aa, ARTIFICIAL SEQUENCE
  Synthetic Construct
EKYHIK

SEQ ID NO: 12136 - protein, 6 aa, ARTIFICIAL SEQUENCE
  Synthetic Construct
EKYHLK

SEQ ID NO: 12137 - protein, 6 aa, ARTIFICIAL SEQUENCE
  Synthetic Construct
EKYHNK

SEQ ID NO: 12138 - protein, 6 aa, ARTIFICIAL SEQUENCE
  Synthetic Construct
EKYHQK

SEQ ID NO: 12139 - protein, 6 aa, ARTIFICIAL SEQUENCE
  Synthetic Construct
EKYHRK

SEQ ID NO: 12140 - protein, 6 aa, ARTIFICIAL SEQUENCE
  Synthetic Construct
EKYHSK

SEQ ID NO: 12141 - protein, 6 aa, ARTIFICIAL SEQUENCE
  Synthetic Construct
EKYHTK

SEQ ID NO: 12142 - protein, 6 aa, ARTIFICIAL SEQUENCE
  Synthetic Construct
EKYHYK

SEQ ID NO: 12143 - protein, 6 aa, ARTIFICIAL SEQUENCE
  Synthetic Construct
EKYIAK

SEQ ID NO: 12144 - protein, 6 aa, ARTIFICIAL SEQUENCE
  Synthetic Construct
EKYIDK

SEQ ID NO: 12145 - protein, 6 aa, ARTIFICIAL SEQUENCE
  Synthetic Construct
EKYIEK

SEQ ID NO: 12146 - protein, 6 aa, ARTIFICIAL SEQUENCE
  Synthetic Construct
EKYIFK

SEQ ID NO: 12147 - protein, 6 aa, ARTIFICIAL SEQUENCE
  Synthetic Construct
EKYIGK

SEQ ID NO: 12148 - protein, 6 aa, ARTIFICIAL SEQUENCE
  Synthetic Construct
EKYIHK

SEQ ID NO: 12149 - protein, 6 aa, ARTIFICIAL SEQUENCE
  Synthetic Construct
EKYIIK

SEQ ID NO: 12150 - protein, 6 aa, ARTIFICIAL SEQUENCE
  Synthetic Construct
EKYILK

SEQ ID NO: 12151 - protein, 6 aa, ARTIFICIAL SEQUENCE
  Synthetic Construct
EKYINK

SEQ ID NO: 12152 - protein, 6 aa, ARTIFICIAL SEQUENCE
  Synthetic Construct
EKYIQK

SEQ ID NO: 12153 - protein, 6 aa, ARTIFICIAL SEQUENCE
  Synthetic Construct
EKYIRK

SEQ ID NO: 12154 - protein, 6 aa, ARTIFICIAL SEQUENCE
  Synthetic Construct
EKYISK

SEQ ID NO: 12155 - protein, 6 aa, ARTIFICIAL SEQUENCE
  Synthetic Construct
EKYITK

SEQ ID NO: 12156 - protein, 6 aa, ARTIFICIAL SEQUENCE
  Synthetic Construct
EKYIYK

SEQ ID NO: 12157 - protein, 6 aa, ARTIFICIAL SEQUENCE
  Synthetic Construct
EKYLAK

SEQ ID NO: 12158 - protein, 6 aa, ARTIFICIAL SEQUENCE
  Synthetic Construct
EKYLDK

SEQ ID NO: 12159 - protein, 6 aa, ARTIFICIAL SEQUENCE
  Synthetic Construct
EKYLEK

SEQ ID NO: 12160 - protein, 6 aa, ARTIFICIAL SEQUENCE
  Synthetic Construct
EKYLFK

SEQ ID NO: 12161 - protein, 6 aa, ARTIFICIAL SEQUENCE
  Synthetic Construct
EKYLGK

SEQ ID NO: 12162 - protein, 6 aa, ARTIFICIAL SEQUENCE
  Synthetic Construct
EKYLHK

SEQ ID NO: 12163 - protein, 6 aa, ARTIFICIAL SEQUENCE
  Synthetic Construct
EKYLIK

SEQ ID NO: 12164 - protein, 6 aa, ARTIFICIAL SEQUENCE
  Synthetic Construct
EKYLLK

SEQ ID NO: 12165 - protein, 6 aa, ARTIFICIAL SEQUENCE
  Synthetic Construct
EKYLNK

SEQ ID NO: 12166 - protein, 6 aa, ARTIFICIAL SEQUENCE
  Synthetic Construct
EKYLQK

SEQ ID NO: 12167 - protein, 6 aa, ARTIFICIAL SEQUENCE
  Synthetic Construct
EKYLRK

SEQ ID NO: 12168 - protein, 6 aa, ARTIFICIAL SEQUENCE
  Synthetic Construct
EKYLSK

SEQ ID NO: 12169 - protein, 6 aa, ARTIFICIAL SEQUENCE
  Synthetic Construct
EKYLTK

SEQ ID NO: 12170 - protein, 6 aa, ARTIFICIAL SEQUENCE
  Synthetic Construct
EKYLYK

SEQ ID NO: 12171 - protein, 6 aa, ARTIFICIAL SEQUENCE
  Synthetic Construct
EKYNAK

SEQ ID NO: 12172 - protein, 6 aa, ARTIFICIAL SEQUENCE
  Synthetic Construct
EKYNDK

SEQ ID NO: 12173 - protein, 6 aa, ARTIFICIAL SEQUENCE
  Synthetic Construct
EKYNEK

SEQ ID NO: 12174 - protein, 6 aa, ARTIFICIAL SEQUENCE
  Synthetic Construct
EKYNFK

SEQ ID NO: 12175 - protein, 6 aa, ARTIFICIAL SEQUENCE
  Synthetic Construct
EKYNGK

SEQ ID NO: 12176 - protein, 6 aa, ARTIFICIAL SEQUENCE
  Synthetic Construct
EKYNHK

SEQ ID NO: 12177 - protein, 6 aa, ARTIFICIAL SEQUENCE
  Synthetic Construct
EKYNIK

SEQ ID NO: 12178 - protein, 6 aa, ARTIFICIAL SEQUENCE
  Synthetic Construct
EKYNLK

SEQ ID NO: 12179 - protein, 6 aa, ARTIFICIAL SEQUENCE
  Synthetic Construct
EKYNNK

SEQ ID NO: 12180 - protein, 6 aa, ARTIFICIAL SEQUENCE
  Synthetic Construct
EKYNQK

SEQ ID NO: 12181 - protein, 6 aa, ARTIFICIAL SEQUENCE
  Synthetic Construct
EKYNRK

SEQ ID NO: 12182 - protein, 6 aa, ARTIFICIAL SEQUENCE
  Synthetic Construct
EKYNSK

SEQ ID NO: 12183 - protein, 6 aa, ARTIFICIAL SEQUENCE
  Synthetic Construct
EKYNTK

SEQ ID NO: 12184 - protein, 6 aa, ARTIFICIAL SEQUENCE
  Synthetic Construct
EKYNYK

SEQ ID NO: 12185 - protein, 6 aa, ARTIFICIAL SEQUENCE
  Synthetic Construct
EKYQAK

SEQ ID NO: 12186 - protein, 6 aa, ARTIFICIAL SEQUENCE
  Synthetic Construct
EKYQDK

SEQ ID NO: 12187 - protein, 6 aa, ARTIFICIAL SEQUENCE
  Synthetic Construct
EKYQEK

SEQ ID NO: 12188 - protein, 6 aa, ARTIFICIAL SEQUENCE
  Synthetic Construct
EKYQFK

SEQ ID NO: 12189 - protein, 6 aa, ARTIFICIAL SEQUENCE
  Synthetic Construct
EKYQGK

SEQ ID NO: 12190 - protein, 6 aa, ARTIFICIAL SEQUENCE
  Synthetic Construct
EKYQHK

SEQ ID NO: 12191 - protein, 6 aa, ARTIFICIAL SEQUENCE
  Synthetic Construct
EKYQIK

SEQ ID NO: 12192 - protein, 6 aa, ARTIFICIAL SEQUENCE
  Synthetic Construct
EKYQLK

SEQ ID NO: 12193 - protein, 6 aa, ARTIFICIAL SEQUENCE
  Synthetic Construct
EKYQNK

SEQ ID NO: 12194 - protein, 6 aa, ARTIFICIAL SEQUENCE
  Synthetic Construct
EKYQQK

SEQ ID NO: 12195 - protein, 6 aa, ARTIFICIAL SEQUENCE
  Synthetic Construct
EKYQRK

SEQ ID NO: 12196 - protein, 6 aa, ARTIFICIAL SEQUENCE
  Synthetic Construct
EKYQSK

SEQ ID NO: 12197 - protein, 6 aa, ARTIFICIAL SEQUENCE
  Synthetic Construct
EKYQTK

SEQ ID NO: 12198 - protein, 6 aa, ARTIFICIAL SEQUENCE
  Synthetic Construct
EKYQYK

SEQ ID NO: 12199 - protein, 6 aa, ARTIFICIAL SEQUENCE
  Synthetic Construct
EKYRAK

SEQ ID NO: 12200 - protein, 6 aa, ARTIFICIAL SEQUENCE
  Synthetic Construct
EKYRDK

SEQ ID NO: 12201 - protein, 6 aa, ARTIFICIAL SEQUENCE
  Synthetic Construct
EKYREK

SEQ ID NO: 12202 - protein, 6 aa, ARTIFICIAL SEQUENCE
  Synthetic Construct
EKYRFK

SEQ ID NO: 12203 - protein, 6 aa, ARTIFICIAL SEQUENCE
  Synthetic Construct
EKYRGK

SEQ ID NO: 12204 - protein, 6 aa, ARTIFICIAL SEQUENCE
  Synthetic Construct
EKYRHK

SEQ ID NO: 12205 - protein, 6 aa, ARTIFICIAL SEQUENCE
  Synthetic Construct
EKYRIK

SEQ ID NO: 12206 - protein, 6 aa, ARTIFICIAL SEQUENCE
  Synthetic Construct
EKYRLK

SEQ ID NO: 12207 - protein, 6 aa, ARTIFICIAL SEQUENCE
  Synthetic Construct
EKYRNK

SEQ ID NO: 12208 - protein, 6 aa, ARTIFICIAL SEQUENCE
  Synthetic Construct
EKYRQK

SEQ ID NO: 12209 - protein, 6 aa, ARTIFICIAL SEQUENCE
  Synthetic Construct
EKYRRK

SEQ ID NO: 12210 - protein, 6 aa, ARTIFICIAL SEQUENCE
  Synthetic Construct
EKYRSK

SEQ ID NO: 12211 - protein, 6 aa, ARTIFICIAL SEQUENCE
  Synthetic Construct
EKYRTK

SEQ ID NO: 12212 - protein, 6 aa, ARTIFICIAL SEQUENCE
  Synthetic Construct
EKYRYK

SEQ ID NO: 12213 - protein, 6 aa, ARTIFICIAL SEQUENCE
  Synthetic Construct
EKYSAK

SEQ ID NO: 12214 - protein, 6 aa, ARTIFICIAL SEQUENCE
  Synthetic Construct
EKYSDK

SEQ ID NO: 12215 - protein, 6 aa, ARTIFICIAL SEQUENCE
  Synthetic Construct
EKYSEK

SEQ ID NO: 12216 - protein, 6 aa, ARTIFICIAL SEQUENCE
  Synthetic Construct
EKYSFK

SEQ ID NO: 12217 - protein, 6 aa, ARTIFICIAL SEQUENCE
  Synthetic Construct
EKYSGK

SEQ ID NO: 12218 - protein, 6 aa, ARTIFICIAL SEQUENCE
  Synthetic Construct
EKYSHK

SEQ ID NO: 12219 - protein, 6 aa, ARTIFICIAL SEQUENCE
  Synthetic Construct
EKYSIK

SEQ ID NO: 12220 - protein, 6 aa, ARTIFICIAL SEQUENCE
  Synthetic Construct
EKYSLK

SEQ ID NO: 12221 - protein, 6 aa, ARTIFICIAL SEQUENCE
  Synthetic Construct
EKYSNK

SEQ ID NO: 12222 - protein, 6 aa, ARTIFICIAL SEQUENCE
  Synthetic Construct
EKYSQK

SEQ ID NO: 12223 - protein, 6 aa, ARTIFICIAL SEQUENCE
  Synthetic Construct
EKYSRK

SEQ ID NO: 12224 - protein, 6 aa, ARTIFICIAL SEQUENCE
  Synthetic Construct
EKYSSK

SEQ ID NO: 12225 - protein, 6 aa, ARTIFICIAL SEQUENCE
  Synthetic Construct
EKYSTK

SEQ ID NO: 12226 - protein, 6 aa, ARTIFICIAL SEQUENCE
  Synthetic Construct
EKYSYK

SEQ ID NO: 12227 - protein, 6 aa, ARTIFICIAL SEQUENCE
  Synthetic Construct
EKYTAK

SEQ ID NO: 12228 - protein, 6 aa, ARTIFICIAL SEQUENCE
  Synthetic Construct
EKYTDK

SEQ ID NO: 12229 - protein, 6 aa, ARTIFICIAL SEQUENCE
  Synthetic Construct
EKYTEK

SEQ ID NO: 12230 - protein, 6 aa, ARTIFICIAL SEQUENCE
  Synthetic Construct
EKYTFK

SEQ ID NO: 12231 - protein, 6 aa, ARTIFICIAL SEQUENCE
  Synthetic Construct
EKYTGK

SEQ ID NO: 12232 - protein, 6 aa, ARTIFICIAL SEQUENCE
  Synthetic Construct
EKYTHK

SEQ ID NO: 12233 - protein, 6 aa, ARTIFICIAL SEQUENCE
  Synthetic Construct
EKYTIK

SEQ ID NO: 12234 - protein, 6 aa, ARTIFICIAL SEQUENCE
  Synthetic Construct
EKYTLK

SEQ ID NO: 12235 - protein, 6 aa, ARTIFICIAL SEQUENCE
  Synthetic Construct
EKYTNK

SEQ ID NO: 12236 - protein, 6 aa, ARTIFICIAL SEQUENCE
  Synthetic Construct
EKYTQK

SEQ ID NO: 12237 - protein, 6 aa, ARTIFICIAL SEQUENCE
  Synthetic Construct
EKYTRK

SEQ ID NO: 12238 - protein, 6 aa, ARTIFICIAL SEQUENCE
  Synthetic Construct
EKYTSK

SEQ ID NO: 12239 - protein, 6 aa, ARTIFICIAL SEQUENCE
  Synthetic Construct
EKYTTK

SEQ ID NO: 12240 - protein, 6 aa, ARTIFICIAL SEQUENCE
  Synthetic Construct
EKYTYK

SEQ ID NO: 12241 - protein, 6 aa, ARTIFICIAL SEQUENCE
  Synthetic Construct
EKYYAK

SEQ ID NO: 12242 - protein, 6 aa, ARTIFICIAL SEQUENCE
  Synthetic Construct
EKYYDK

SEQ ID NO: 12243 - protein, 6 aa, ARTIFICIAL SEQUENCE
  Synthetic Construct
EKYYEK

SEQ ID NO: 12244 - protein, 6 aa, ARTIFICIAL SEQUENCE
  Synthetic Construct
EKYYFK

SEQ ID NO: 12245 - protein, 6 aa, ARTIFICIAL SEQUENCE
  Synthetic Construct
EKYYGK

SEQ ID NO: 12246 - protein, 6 aa, ARTIFICIAL SEQUENCE
  Synthetic Construct
EKYYHK

SEQ ID NO: 12247 - protein, 6 aa, ARTIFICIAL SEQUENCE
  Synthetic Construct
EKYYIK

SEQ ID NO: 12248 - protein, 6 aa, ARTIFICIAL SEQUENCE
  Synthetic Construct
EKYYLK

SEQ ID NO: 12249 - protein, 6 aa, ARTIFICIAL SEQUENCE
  Synthetic Construct
EKYYNK

SEQ ID NO: 12250 - protein, 6 aa, ARTIFICIAL SEQUENCE
  Synthetic Construct
EKYYQK

SEQ ID NO: 12251 - protein, 6 aa, ARTIFICIAL SEQUENCE
  Synthetic Construct
EKYYRK

SEQ ID NO: 12252 - protein, 6 aa, ARTIFICIAL SEQUENCE
  Synthetic Construct
EKYYSK

SEQ ID NO: 12253 - protein, 6 aa, ARTIFICIAL SEQUENCE
  Synthetic Construct
EKYYTK

SEQ ID NO: 12254 - protein, 6 aa, ARTIFICIAL SEQUENCE
  Synthetic Construct
EKYYYK

SEQ ID NO: 12255 - protein, 6 aa, ARTIFICIAL SEQUENCE
  Synthetic Construct
GKAAAK

SEQ ID NO: 12256 - protein, 6 aa, ARTIFICIAL SEQUENCE
  Synthetic Construct
GKAADK

SEQ ID NO: 12257 - protein, 6 aa, ARTIFICIAL SEQUENCE
  Synthetic Construct
GKAAEK

SEQ ID NO: 12258 - protein, 6 aa, ARTIFICIAL SEQUENCE
  Synthetic Construct
GKAAFK

SEQ ID NO: 12259 - protein, 6 aa, ARTIFICIAL SEQUENCE
  Synthetic Construct
GKAAGK

SEQ ID NO: 12260 - protein, 6 aa, ARTIFICIAL SEQUENCE
  Synthetic Construct
GKAAHK

SEQ ID NO: 12261 - protein, 6 aa, ARTIFICIAL SEQUENCE
  Synthetic Construct
GKAAIK

SEQ ID NO: 12262 - protein, 6 aa, ARTIFICIAL SEQUENCE
  Synthetic Construct
GKAALK

SEQ ID NO: 12263 - protein, 6 aa, ARTIFICIAL SEQUENCE
  Synthetic Construct
GKAANK

SEQ ID NO: 12264 - protein, 6 aa, ARTIFICIAL SEQUENCE
  Synthetic Construct
GKAAQK

SEQ ID NO: 12265 - protein, 6 aa, ARTIFICIAL SEQUENCE
  Synthetic Construct
GKAARK

SEQ ID NO: 12266 - protein, 6 aa, ARTIFICIAL SEQUENCE
  Synthetic Construct
GKAASK

SEQ ID NO: 12267 - protein, 6 aa, ARTIFICIAL SEQUENCE
  Synthetic Construct
GKAATK

SEQ ID NO: 12268 - protein, 6 aa, ARTIFICIAL SEQUENCE
  Synthetic Construct
GKAAYK

SEQ ID NO: 12269 - protein, 6 aa, ARTIFICIAL SEQUENCE
  Synthetic Construct
GKADAK

SEQ ID NO: 12270 - protein, 6 aa, ARTIFICIAL SEQUENCE
  Synthetic Construct
GKADDK

SEQ ID NO: 12271 - protein, 6 aa, ARTIFICIAL SEQUENCE
  Synthetic Construct
GKADEK

SEQ ID NO: 12272 - protein, 6 aa, ARTIFICIAL SEQUENCE
  Synthetic Construct
GKADFK

SEQ ID NO: 12273 - protein, 6 aa, ARTIFICIAL SEQUENCE
  Synthetic Construct
GKADGK

SEQ ID NO: 12274 - protein, 6 aa, ARTIFICIAL SEQUENCE
  Synthetic Construct
GKADHK

SEQ ID NO: 12275 - protein, 6 aa, ARTIFICIAL SEQUENCE
  Synthetic Construct
GKADIK

SEQ ID NO: 12276 - protein, 6 aa, ARTIFICIAL SEQUENCE
  Synthetic Construct
GKADLK

SEQ ID NO: 12277 - protein, 6 aa, ARTIFICIAL SEQUENCE
  Synthetic Construct
GKADNK

SEQ ID NO: 12278 - protein, 6 aa, ARTIFICIAL SEQUENCE
  Synthetic Construct
GKADQK

SEQ ID NO: 12279 - protein, 6 aa, ARTIFICIAL SEQUENCE
  Synthetic Construct
GKADRK

SEQ ID NO: 12280 - protein, 6 aa, ARTIFICIAL SEQUENCE
  Synthetic Construct
GKADSK

SEQ ID NO: 12281 - protein, 6 aa, ARTIFICIAL SEQUENCE
  Synthetic Construct
GKADTK

SEQ ID NO: 12282 - protein, 6 aa, ARTIFICIAL SEQUENCE
  Synthetic Construct
GKADYK

SEQ ID NO: 12283 - protein, 6 aa, ARTIFICIAL SEQUENCE
  Synthetic Construct
GKAEAK

SEQ ID NO: 12284 - protein, 6 aa, ARTIFICIAL SEQUENCE
  Synthetic Construct
GKAEDK

SEQ ID NO: 12285 - protein, 6 aa, ARTIFICIAL SEQUENCE
  Synthetic Construct
GKAEEK

SEQ ID NO: 12286 - protein, 6 aa, ARTIFICIAL SEQUENCE
  Synthetic Construct
GKAEFK

SEQ ID NO: 12287 - protein, 6 aa, ARTIFICIAL SEQUENCE
  Synthetic Construct
GKAEGK

SEQ ID NO: 12288 - protein, 6 aa, ARTIFICIAL SEQUENCE
  Synthetic Construct
GKAEHK

SEQ ID NO: 12289 - protein, 6 aa, ARTIFICIAL SEQUENCE
  Synthetic Construct
GKAEIK

SEQ ID NO: 12290 - protein, 6 aa, ARTIFICIAL SEQUENCE
  Synthetic Construct
GKAELK

SEQ ID NO: 12291 - protein, 6 aa, ARTIFICIAL SEQUENCE
  Synthetic Construct
GKAENK

SEQ ID NO: 12292 - protein, 6 aa, ARTIFICIAL SEQUENCE
  Synthetic Construct
GKAEQK

SEQ ID NO: 12293 - protein, 6 aa, ARTIFICIAL SEQUENCE
  Synthetic Construct
GKAERK

SEQ ID NO: 12294 - protein, 6 aa, ARTIFICIAL SEQUENCE
  Synthetic Construct
GKAESK

SEQ ID NO: 12295 - protein, 6 aa, ARTIFICIAL SEQUENCE
  Synthetic Construct
GKAETK

SEQ ID NO: 12296 - protein, 6 aa, ARTIFICIAL SEQUENCE
  Synthetic Construct
GKAEYK

SEQ ID NO: 12297 - protein, 6 aa, ARTIFICIAL SEQUENCE
  Synthetic Construct
GKAFAK

SEQ ID NO: 12298 - protein, 6 aa, ARTIFICIAL SEQUENCE
  Synthetic Construct
GKAFDK

SEQ ID NO: 12299 - protein, 6 aa, ARTIFICIAL SEQUENCE
  Synthetic Construct
GKAFEK

SEQ ID NO: 12300 - protein, 6 aa, ARTIFICIAL SEQUENCE
  Synthetic Construct
GKAFFK

SEQ ID NO: 12301 - protein, 6 aa, ARTIFICIAL SEQUENCE
  Synthetic Construct
GKAFGK

SEQ ID NO: 12302 - protein, 6 aa, ARTIFICIAL SEQUENCE
  Synthetic Construct
GKAFHK

SEQ ID NO: 12303 - protein, 6 aa, ARTIFICIAL SEQUENCE
  Synthetic Construct
GKAFIK

SEQ ID NO: 12304 - protein, 6 aa, ARTIFICIAL SEQUENCE
  Synthetic Construct
GKAFLK

SEQ ID NO: 12305 - protein, 6 aa, ARTIFICIAL SEQUENCE
  Synthetic Construct
GKAFNK

SEQ ID NO: 12306 - protein, 6 aa, ARTIFICIAL SEQUENCE
  Synthetic Construct
GKAFQK

SEQ ID NO: 12307 - protein, 6 aa, ARTIFICIAL SEQUENCE
  Synthetic Construct
GKAFRK

SEQ ID NO: 12308 - protein, 6 aa, ARTIFICIAL SEQUENCE
  Synthetic Construct
GKAFSK

SEQ ID NO: 12309 - protein, 6 aa, ARTIFICIAL SEQUENCE
  Synthetic Construct
GKAFTK

SEQ ID NO: 12310 - protein, 6 aa, ARTIFICIAL SEQUENCE
  Synthetic Construct
GKAFYK

SEQ ID NO: 12311 - protein, 6 aa, ARTIFICIAL SEQUENCE
  Synthetic Construct
GKAGAK

SEQ ID NO: 12312 - protein, 6 aa, ARTIFICIAL SEQUENCE
  Synthetic Construct
GKAGDK

SEQ ID NO: 12313 - protein, 6 aa, ARTIFICIAL SEQUENCE
  Synthetic Construct
GKAGEK

SEQ ID NO: 12314 - protein, 6 aa, ARTIFICIAL SEQUENCE
  Synthetic Construct
GKAGFK

SEQ ID NO: 12315 - protein, 6 aa, ARTIFICIAL SEQUENCE
  Synthetic Construct
GKAGGK

SEQ ID NO: 12316 - protein, 6 aa, ARTIFICIAL SEQUENCE
  Synthetic Construct
GKAGHK

SEQ ID NO: 12317 - protein, 6 aa, ARTIFICIAL SEQUENCE
  Synthetic Construct
GKAGIK

SEQ ID NO: 12318 - protein, 6 aa, ARTIFICIAL SEQUENCE
  Synthetic Construct
GKAGLK

SEQ ID NO: 12319 - protein, 6 aa, ARTIFICIAL SEQUENCE
  Synthetic Construct
GKAGNK

SEQ ID NO: 12320 - protein, 6 aa, ARTIFICIAL SEQUENCE
  Synthetic Construct
GKAGQK

SEQ ID NO: 12321 - protein, 6 aa, ARTIFICIAL SEQUENCE
  Synthetic Construct
GKAGRK

SEQ ID NO: 12322 - protein, 6 aa, ARTIFICIAL SEQUENCE
  Synthetic Construct
GKAGSK

SEQ ID NO: 12323 - protein, 6 aa, ARTIFICIAL SEQUENCE
  Synthetic Construct
GKAGTK

SEQ ID NO: 12324 - protein, 6 aa, ARTIFICIAL SEQUENCE
  Synthetic Construct
GKAGYK

SEQ ID NO: 12325 - protein, 6 aa, ARTIFICIAL SEQUENCE
  Synthetic Construct
GKAHAK

SEQ ID NO: 12326 - protein, 6 aa, ARTIFICIAL SEQUENCE
  Synthetic Construct
GKAHDK

SEQ ID NO: 12327 - protein, 6 aa, ARTIFICIAL SEQUENCE
  Synthetic Construct
GKAHEK

SEQ ID NO: 12328 - protein, 6 aa, ARTIFICIAL SEQUENCE
  Synthetic Construct
GKAHFK

SEQ ID NO: 12329 - protein, 6 aa, ARTIFICIAL SEQUENCE
  Synthetic Construct
GKAHGK

SEQ ID NO: 12330 - protein, 6 aa, ARTIFICIAL SEQUENCE
  Synthetic Construct
GKAHHK

SEQ ID NO: 12331 - protein, 6 aa, ARTIFICIAL SEQUENCE
  Synthetic Construct
GKAHIK

SEQ ID NO: 12332 - protein, 6 aa, ARTIFICIAL SEQUENCE
  Synthetic Construct
GKAHLK

SEQ ID NO: 12333 - protein, 6 aa, ARTIFICIAL SEQUENCE
  Synthetic Construct
GKAHNK

SEQ ID NO: 12334 - protein, 6 aa, ARTIFICIAL SEQUENCE
  Synthetic Construct
GKAHQK

SEQ ID NO: 12335 - protein, 6 aa, ARTIFICIAL SEQUENCE
  Synthetic Construct
GKAHRK

SEQ ID NO: 12336 - protein, 6 aa, ARTIFICIAL SEQUENCE
  Synthetic Construct
GKAHSK

SEQ ID NO: 12337 - protein, 6 aa, ARTIFICIAL SEQUENCE
  Synthetic Construct
GKAHTK

SEQ ID NO: 12338 - protein, 6 aa, ARTIFICIAL SEQUENCE
  Synthetic Construct
GKAHYK

SEQ ID NO: 12339 - protein, 6 aa, ARTIFICIAL SEQUENCE
  Synthetic Construct
GKAIAK

SEQ ID NO: 12340 - protein, 6 aa, ARTIFICIAL SEQUENCE
  Synthetic Construct
GKAIDK

SEQ ID NO: 12341 - protein, 6 aa, ARTIFICIAL SEQUENCE
  Synthetic Construct
GKAIEK

SEQ ID NO: 12342 - protein, 6 aa, ARTIFICIAL SEQUENCE
  Synthetic Construct
GKAIFK

SEQ ID NO: 12343 - protein, 6 aa, ARTIFICIAL SEQUENCE
  Synthetic Construct
GKAIGK

SEQ ID NO: 12344 - protein, 6 aa, ARTIFICIAL SEQUENCE
  Synthetic Construct
GKAIHK

SEQ ID NO: 12345 - protein, 6 aa, ARTIFICIAL SEQUENCE
  Synthetic Construct
GKAIIK

SEQ ID NO: 12346 - protein, 6 aa, ARTIFICIAL SEQUENCE
  Synthetic Construct
GKAILK

SEQ ID NO: 12347 - protein, 6 aa, ARTIFICIAL SEQUENCE
  Synthetic Construct
GKAINK

SEQ ID NO: 12348 - protein, 6 aa, ARTIFICIAL SEQUENCE
  Synthetic Construct
GKAIQK

SEQ ID NO: 12349 - protein, 6 aa, ARTIFICIAL SEQUENCE
  Synthetic Construct
GKAIRK

SEQ ID NO: 12350 - protein, 6 aa, ARTIFICIAL SEQUENCE
  Synthetic Construct
GKAISK

SEQ ID NO: 12351 - protein, 6 aa, ARTIFICIAL SEQUENCE
  Synthetic Construct
GKAITK

SEQ ID NO: 12352 - protein, 6 aa, ARTIFICIAL SEQUENCE
  Synthetic Construct
GKAIYK

SEQ ID NO: 12353 - protein, 6 aa, ARTIFICIAL SEQUENCE
  Synthetic Construct
GKALAK

SEQ ID NO: 12354 - protein, 6 aa, ARTIFICIAL SEQUENCE
  Synthetic Construct
GKALDK

SEQ ID NO: 12355 - protein, 6 aa, ARTIFICIAL SEQUENCE
  Synthetic Construct
GKALEK

SEQ ID NO: 12356 - protein, 6 aa, ARTIFICIAL SEQUENCE
  Synthetic Construct
GKALFK

SEQ ID NO: 12357 - protein, 6 aa, ARTIFICIAL SEQUENCE
  Synthetic Construct
GKALGK

SEQ ID NO: 12358 - protein, 6 aa, ARTIFICIAL SEQUENCE
  Synthetic Construct
GKALHK

SEQ ID NO: 12359 - protein, 6 aa, ARTIFICIAL SEQUENCE
  Synthetic Construct
GKALIK

SEQ ID NO: 12360 - protein, 6 aa, ARTIFICIAL SEQUENCE
  Synthetic Construct
GKALLK

SEQ ID NO: 12361 - protein, 6 aa, ARTIFICIAL SEQUENCE
  Synthetic Construct
GKALNK

SEQ ID NO: 12362 - protein, 6 aa, ARTIFICIAL SEQUENCE
  Synthetic Construct
GKALQK

SEQ ID NO: 12363 - protein, 6 aa, ARTIFICIAL SEQUENCE
  Synthetic Construct
GKALRK

SEQ ID NO: 12364 - protein, 6 aa, ARTIFICIAL SEQUENCE
  Synthetic Construct
GKALSK

SEQ ID NO: 12365 - protein, 6 aa, ARTIFICIAL SEQUENCE
  Synthetic Construct
GKALTK

SEQ ID NO: 12366 - protein, 6 aa, ARTIFICIAL SEQUENCE
  Synthetic Construct
GKALYK

SEQ ID NO: 12367 - protein, 6 aa, ARTIFICIAL SEQUENCE
  Synthetic Construct
GKANAK

SEQ ID NO: 12368 - protein, 6 aa, ARTIFICIAL SEQUENCE
  Synthetic Construct
GKANDK

SEQ ID NO: 12369 - protein, 6 aa, ARTIFICIAL SEQUENCE
  Synthetic Construct
GKANEK

SEQ ID NO: 12370 - protein, 6 aa, ARTIFICIAL SEQUENCE
  Synthetic Construct
GKANFK

SEQ ID NO: 12371 - protein, 6 aa, ARTIFICIAL SEQUENCE
  Synthetic Construct
GKANGK

SEQ ID NO: 12372 - protein, 6 aa, ARTIFICIAL SEQUENCE
  Synthetic Construct
GKANHK

SEQ ID NO: 12373 - protein, 6 aa, ARTIFICIAL SEQUENCE
  Synthetic Construct
GKANIK

SEQ ID NO: 12374 - protein, 6 aa, ARTIFICIAL SEQUENCE
  Synthetic Construct
GKANLK

SEQ ID NO: 12375 - protein, 6 aa, ARTIFICIAL SEQUENCE
  Synthetic Construct
GKANNK

SEQ ID NO: 12376 - protein, 6 aa, ARTIFICIAL SEQUENCE
  Synthetic Construct
GKANQK

SEQ ID NO: 12377 - protein, 6 aa, ARTIFICIAL SEQUENCE
  Synthetic Construct
GKANRK

SEQ ID NO: 12378 - protein, 6 aa, ARTIFICIAL SEQUENCE
  Synthetic Construct
GKANSK

SEQ ID NO: 12379 - protein, 6 aa, ARTIFICIAL SEQUENCE
  Synthetic Construct
GKANTK

SEQ ID NO: 12380 - protein, 6 aa, ARTIFICIAL SEQUENCE
  Synthetic Construct
GKANYK

SEQ ID NO: 12381 - protein, 6 aa, ARTIFICIAL SEQUENCE
  Synthetic Construct
GKAQAK

SEQ ID NO: 12382 - protein, 6 aa, ARTIFICIAL SEQUENCE
  Synthetic Construct
GKAQDK

SEQ ID NO: 12383 - protein, 6 aa, ARTIFICIAL SEQUENCE
  Synthetic Construct
GKAQEK

SEQ ID NO: 12384 - protein, 6 aa, ARTIFICIAL SEQUENCE
  Synthetic Construct
GKAQFK

SEQ ID NO: 12385 - protein, 6 aa, ARTIFICIAL SEQUENCE
  Synthetic Construct
GKAQGK

SEQ ID NO: 12386 - protein, 6 aa, ARTIFICIAL SEQUENCE
  Synthetic Construct
GKAQHK

SEQ ID NO: 12387 - protein, 6 aa, ARTIFICIAL SEQUENCE
  Synthetic Construct
GKAQIK

SEQ ID NO: 12388 - protein, 6 aa, ARTIFICIAL SEQUENCE
  Synthetic Construct
GKAQLK

SEQ ID NO: 12389 - protein, 6 aa, ARTIFICIAL SEQUENCE
  Synthetic Construct
GKAQNK

SEQ ID NO: 12390 - protein, 6 aa, ARTIFICIAL SEQUENCE
  Synthetic Construct
GKAQQK

SEQ ID NO: 12391 - protein, 6 aa, ARTIFICIAL SEQUENCE
  Synthetic Construct
GKAQRK

SEQ ID NO: 12392 - protein, 6 aa, ARTIFICIAL SEQUENCE
  Synthetic Construct
GKAQSK

SEQ ID NO: 12393 - protein, 6 aa, ARTIFICIAL SEQUENCE
  Synthetic Construct
GKAQTK

SEQ ID NO: 12394 - protein, 6 aa, ARTIFICIAL SEQUENCE
  Synthetic Construct
GKAQYK

SEQ ID NO: 12395 - protein, 6 aa, ARTIFICIAL SEQUENCE
  Synthetic Construct
GKARAK

SEQ ID NO: 12396 - protein, 6 aa, ARTIFICIAL SEQUENCE
  Synthetic Construct
GKARDK

SEQ ID NO: 12397 - protein, 6 aa, ARTIFICIAL SEQUENCE
  Synthetic Construct
GKAREK

SEQ ID NO: 12398 - protein, 6 aa, ARTIFICIAL SEQUENCE
  Synthetic Construct
GKARFK

SEQ ID NO: 12399 - protein, 6 aa, ARTIFICIAL SEQUENCE
  Synthetic Construct
GKARGK

SEQ ID NO: 12400 - protein, 6 aa, ARTIFICIAL SEQUENCE
  Synthetic Construct
GKARHK

SEQ ID NO: 12401 - protein, 6 aa, ARTIFICIAL SEQUENCE
  Synthetic Construct
GKARIK

SEQ ID NO: 12402 - protein, 6 aa, ARTIFICIAL SEQUENCE
  Synthetic Construct
GKARLK

SEQ ID NO: 12403 - protein, 6 aa, ARTIFICIAL SEQUENCE
  Synthetic Construct
GKARNK

SEQ ID NO: 12404 - protein, 6 aa, ARTIFICIAL SEQUENCE
  Synthetic Construct
GKARQK

SEQ ID NO: 12405 - protein, 6 aa, ARTIFICIAL SEQUENCE
  Synthetic Construct
GKARRK

SEQ ID NO: 12406 - protein, 6 aa, ARTIFICIAL SEQUENCE
  Synthetic Construct
GKARSK

SEQ ID NO: 12407 - protein, 6 aa, ARTIFICIAL SEQUENCE
  Synthetic Construct
GKARTK

SEQ ID NO: 12408 - protein, 6 aa, ARTIFICIAL SEQUENCE
  Synthetic Construct
GKARYK

SEQ ID NO: 12409 - protein, 6 aa, ARTIFICIAL SEQUENCE
  Synthetic Construct
GKASAK

SEQ ID NO: 12410 - protein, 6 aa, ARTIFICIAL SEQUENCE
  Synthetic Construct
GKASDK

SEQ ID NO: 12411 - protein, 6 aa, ARTIFICIAL SEQUENCE
  Synthetic Construct
GKASEK

SEQ ID NO: 12412 - protein, 6 aa, ARTIFICIAL SEQUENCE
  Synthetic Construct
GKASFK

SEQ ID NO: 12413 - protein, 6 aa, ARTIFICIAL SEQUENCE
  Synthetic Construct
GKASGK

SEQ ID NO: 12414 - protein, 6 aa, ARTIFICIAL SEQUENCE
  Synthetic Construct
GKASHK

SEQ ID NO: 12415 - protein, 6 aa, ARTIFICIAL SEQUENCE
  Synthetic Construct
GKASIK

SEQ ID NO: 12416 - protein, 6 aa, ARTIFICIAL SEQUENCE
  Synthetic Construct
GKASLK

SEQ ID NO: 12417 - protein, 6 aa, ARTIFICIAL SEQUENCE
  Synthetic Construct
GKASNK

SEQ ID NO: 12418 - protein, 6 aa, ARTIFICIAL SEQUENCE
  Synthetic Construct
GKASQK

SEQ ID NO: 12419 - protein, 6 aa, ARTIFICIAL SEQUENCE
  Synthetic Construct
GKASRK

SEQ ID NO: 12420 - protein, 6 aa, ARTIFICIAL SEQUENCE
  Synthetic Construct
GKASSK

SEQ ID NO: 12421 - protein, 6 aa, ARTIFICIAL SEQUENCE
  Synthetic Construct
GKASTK

SEQ ID NO: 12422 - protein, 6 aa, ARTIFICIAL SEQUENCE
  Synthetic Construct
GKASYK

SEQ ID NO: 12423 - protein, 6 aa, ARTIFICIAL SEQUENCE
  Synthetic Construct
GKATAK

SEQ ID NO: 12424 - protein, 6 aa, ARTIFICIAL SEQUENCE
  Synthetic Construct
GKATDK

SEQ ID NO: 12425 - protein, 6 aa, ARTIFICIAL SEQUENCE
  Synthetic Construct
GKATEK

SEQ ID NO: 12426 - protein, 6 aa, ARTIFICIAL SEQUENCE
  Synthetic Construct
GKATFK

SEQ ID NO: 12427 - protein, 6 aa, ARTIFICIAL SEQUENCE
  Synthetic Construct
GKATGK

SEQ ID NO: 12428 - protein, 6 aa, ARTIFICIAL SEQUENCE
  Synthetic Construct
GKATHK

SEQ ID NO: 12429 - protein, 6 aa, ARTIFICIAL SEQUENCE
  Synthetic Construct
GKATIK

SEQ ID NO: 12430 - protein, 6 aa, ARTIFICIAL SEQUENCE
  Synthetic Construct
GKATLK

SEQ ID NO: 12431 - protein, 6 aa, ARTIFICIAL SEQUENCE
  Synthetic Construct
GKATNK

SEQ ID NO: 12432 - protein, 6 aa, ARTIFICIAL SEQUENCE
  Synthetic Construct
GKATQK

SEQ ID NO: 12433 - protein, 6 aa, ARTIFICIAL SEQUENCE
  Synthetic Construct
GKATRK

SEQ ID NO: 12434 - protein, 6 aa, ARTIFICIAL SEQUENCE
  Synthetic Construct
GKATSK

SEQ ID NO: 12435 - protein, 6 aa, ARTIFICIAL SEQUENCE
  Synthetic Construct
GKATTK

SEQ ID NO: 12436 - protein, 6 aa, ARTIFICIAL SEQUENCE
  Synthetic Construct
GKATYK

SEQ ID NO: 12437 - protein, 6 aa, ARTIFICIAL SEQUENCE
  Synthetic Construct
GKAYAK

SEQ ID NO: 12438 - protein, 6 aa, ARTIFICIAL SEQUENCE
  Synthetic Construct
GKAYDK

SEQ ID NO: 12439 - protein, 6 aa, ARTIFICIAL SEQUENCE
  Synthetic Construct
GKAYEK

SEQ ID NO: 12440 - protein, 6 aa, ARTIFICIAL SEQUENCE
  Synthetic Construct
GKAYFK

SEQ ID NO: 12441 - protein, 6 aa, ARTIFICIAL SEQUENCE
  Synthetic Construct
GKAYGK

SEQ ID NO: 12442 - protein, 6 aa, ARTIFICIAL SEQUENCE
  Synthetic Construct
GKAYHK

SEQ ID NO: 12443 - protein, 6 aa, ARTIFICIAL SEQUENCE
  Synthetic Construct
GKAYIK

SEQ ID NO: 12444 - protein, 6 aa, ARTIFICIAL SEQUENCE
  Synthetic Construct
GKAYLK

SEQ ID NO: 12445 - protein, 6 aa, ARTIFICIAL SEQUENCE
  Synthetic Construct
GKAYNK

SEQ ID NO: 12446 - protein, 6 aa, ARTIFICIAL SEQUENCE
  Synthetic Construct
GKAYQK

SEQ ID NO: 12447 - protein, 6 aa, ARTIFICIAL SEQUENCE
  Synthetic Construct
GKAYRK

SEQ ID NO: 12448 - protein, 6 aa, ARTIFICIAL SEQUENCE
  Synthetic Construct
GKAYSK

SEQ ID NO: 12449 - protein, 6 aa, ARTIFICIAL SEQUENCE
  Synthetic Construct
GKAYTK

SEQ ID NO: 12450 - protein, 6 aa, ARTIFICIAL SEQUENCE
  Synthetic Construct
GKAYYK

SEQ ID NO: 12451 - protein, 6 aa, ARTIFICIAL SEQUENCE
  Synthetic Construct
GKDAAK

SEQ ID NO: 12452 - protein, 6 aa, ARTIFICIAL SEQUENCE
  Synthetic Construct
GKDADK

SEQ ID NO: 12453 - protein, 6 aa, ARTIFICIAL SEQUENCE
  Synthetic Construct
GKDAEK

SEQ ID NO: 12454 - protein, 6 aa, ARTIFICIAL SEQUENCE
  Synthetic Construct
GKDAFK

SEQ ID NO: 12455 - protein, 6 aa, ARTIFICIAL SEQUENCE
  Synthetic Construct
GKDAGK

SEQ ID NO: 12456 - protein, 6 aa, ARTIFICIAL SEQUENCE
  Synthetic Construct
GKDAHK

SEQ ID NO: 12457 - protein, 6 aa, ARTIFICIAL SEQUENCE
  Synthetic Construct
GKDAIK

SEQ ID NO: 12458 - protein, 6 aa, ARTIFICIAL SEQUENCE
  Synthetic Construct
GKDALK

SEQ ID NO: 12459 - protein, 6 aa, ARTIFICIAL SEQUENCE
  Synthetic Construct
GKDANK

SEQ ID NO: 12460 - protein, 6 aa, ARTIFICIAL SEQUENCE
  Synthetic Construct
GKDAQK

SEQ ID NO: 12461 - protein, 6 aa, ARTIFICIAL SEQUENCE
  Synthetic Construct
GKDARK

SEQ ID NO: 12462 - protein, 6 aa, ARTIFICIAL SEQUENCE
  Synthetic Construct
GKDASK

SEQ ID NO: 12463 - protein, 6 aa, ARTIFICIAL SEQUENCE
  Synthetic Construct
GKDATK

SEQ ID NO: 12464 - protein, 6 aa, ARTIFICIAL SEQUENCE
  Synthetic Construct
GKDAYK

SEQ ID NO: 12465 - protein, 6 aa, ARTIFICIAL SEQUENCE
  Synthetic Construct
GKDDAK

SEQ ID NO: 12466 - protein, 6 aa, ARTIFICIAL SEQUENCE
  Synthetic Construct
GKDDDK

SEQ ID NO: 12467 - protein, 6 aa, ARTIFICIAL SEQUENCE
  Synthetic Construct
GKDDEK

SEQ ID NO: 12468 - protein, 6 aa, ARTIFICIAL SEQUENCE
  Synthetic Construct
GKDDFK

SEQ ID NO: 12469 - protein, 6 aa, ARTIFICIAL SEQUENCE
  Synthetic Construct
GKDDGK

SEQ ID NO: 12470 - protein, 6 aa, ARTIFICIAL SEQUENCE
  Synthetic Construct
GKDDHK

SEQ ID NO: 12471 - protein, 6 aa, ARTIFICIAL SEQUENCE
  Synthetic Construct
GKDDIK

SEQ ID NO: 12472 - protein, 6 aa, ARTIFICIAL SEQUENCE
  Synthetic Construct
GKDDLK

SEQ ID NO: 12473 - protein, 6 aa, ARTIFICIAL SEQUENCE
  Synthetic Construct
GKDDNK

SEQ ID NO: 12474 - protein, 6 aa, ARTIFICIAL SEQUENCE
  Synthetic Construct
GKDDQK

SEQ ID NO: 12475 - protein, 6 aa, ARTIFICIAL SEQUENCE
  Synthetic Construct
GKDDRK

SEQ ID NO: 12476 - protein, 6 aa, ARTIFICIAL SEQUENCE
  Synthetic Construct
GKDDSK

SEQ ID NO: 12477 - protein, 6 aa, ARTIFICIAL SEQUENCE
  Synthetic Construct
GKDDTK

SEQ ID NO: 12478 - protein, 6 aa, ARTIFICIAL SEQUENCE
  Synthetic Construct
GKDDYK

SEQ ID NO: 12479 - protein, 6 aa, ARTIFICIAL SEQUENCE
  Synthetic Construct
GKDEAK

SEQ ID NO: 12480 - protein, 6 aa, ARTIFICIAL SEQUENCE
  Synthetic Construct
GKDEDK

SEQ ID NO: 12481 - protein, 6 aa, ARTIFICIAL SEQUENCE
  Synthetic Construct
GKDEEK

SEQ ID NO: 12482 - protein, 6 aa, ARTIFICIAL SEQUENCE
  Synthetic Construct
GKDEFK

SEQ ID NO: 12483 - protein, 6 aa, ARTIFICIAL SEQUENCE
  Synthetic Construct
GKDEGK

SEQ ID NO: 12484 - protein, 6 aa, ARTIFICIAL SEQUENCE
  Synthetic Construct
GKDEHK

SEQ ID NO: 12485 - protein, 6 aa, ARTIFICIAL SEQUENCE
  Synthetic Construct
GKDEIK

SEQ ID NO: 12486 - protein, 6 aa, ARTIFICIAL SEQUENCE
  Synthetic Construct
GKDELK

SEQ ID NO: 12487 - protein, 6 aa, ARTIFICIAL SEQUENCE
  Synthetic Construct
GKDENK

SEQ ID NO: 12488 - protein, 6 aa, ARTIFICIAL SEQUENCE
  Synthetic Construct
GKDEQK

SEQ ID NO: 12489 - protein, 6 aa, ARTIFICIAL SEQUENCE
  Synthetic Construct
GKDERK

SEQ ID NO: 12490 - protein, 6 aa, ARTIFICIAL SEQUENCE
  Synthetic Construct
GKDESK

SEQ ID NO: 12491 - protein, 6 aa, ARTIFICIAL SEQUENCE
  Synthetic Construct
GKDETK

SEQ ID NO: 12492 - protein, 6 aa, ARTIFICIAL SEQUENCE
  Synthetic Construct
GKDEYK

SEQ ID NO: 12493 - protein, 6 aa, ARTIFICIAL SEQUENCE
  Synthetic Construct
GKDFAK

SEQ ID NO: 12494 - protein, 6 aa, ARTIFICIAL SEQUENCE
  Synthetic Construct
GKDFDK

SEQ ID NO: 12495 - protein, 6 aa, ARTIFICIAL SEQUENCE
  Synthetic Construct
GKDFEK

SEQ ID NO: 12496 - protein, 6 aa, ARTIFICIAL SEQUENCE
  Synthetic Construct
GKDFFK

SEQ ID NO: 12497 - protein, 6 aa, ARTIFICIAL SEQUENCE
  Synthetic Construct
GKDFGK

SEQ ID NO: 12498 - protein, 6 aa, ARTIFICIAL SEQUENCE
  Synthetic Construct
GKDFHK

SEQ ID NO: 12499 - protein, 6 aa, ARTIFICIAL SEQUENCE
  Synthetic Construct
GKDFIK

SEQ ID NO: 12500 - protein, 6 aa, ARTIFICIAL SEQUENCE
  Synthetic Construct
GKDFLK

SEQ ID NO: 12501 - protein, 6 aa, ARTIFICIAL SEQUENCE
  Synthetic Construct
GKDFNK

SEQ ID NO: 12502 - protein, 6 aa, ARTIFICIAL SEQUENCE
  Synthetic Construct
GKDFQK

SEQ ID NO: 12503 - protein, 6 aa, ARTIFICIAL SEQUENCE
  Synthetic Construct
GKDFRK

SEQ ID NO: 12504 - protein, 6 aa, ARTIFICIAL SEQUENCE
  Synthetic Construct
GKDFSK

SEQ ID NO: 12505 - protein, 6 aa, ARTIFICIAL SEQUENCE
  Synthetic Construct
GKDFTK

SEQ ID NO: 12506 - protein, 6 aa, ARTIFICIAL SEQUENCE
  Synthetic Construct
GKDFYK

SEQ ID NO: 12507 - protein, 6 aa, ARTIFICIAL SEQUENCE
  Synthetic Construct
GKDGAK

SEQ ID NO: 12508 - protein, 6 aa, ARTIFICIAL SEQUENCE
  Synthetic Construct
GKDGDK

SEQ ID NO: 12509 - protein, 6 aa, ARTIFICIAL SEQUENCE
  Synthetic Construct
GKDGEK

SEQ ID NO: 12510 - protein, 6 aa, ARTIFICIAL SEQUENCE
  Synthetic Construct
GKDGFK

SEQ ID NO: 12511 - protein, 6 aa, ARTIFICIAL SEQUENCE
  Synthetic Construct
GKDGGK

SEQ ID NO: 12512 - protein, 6 aa, ARTIFICIAL SEQUENCE
  Synthetic Construct
GKDGHK

SEQ ID NO: 12513 - protein, 6 aa, ARTIFICIAL SEQUENCE
  Synthetic Construct
GKDGIK

SEQ ID NO: 12514 - protein, 6 aa, ARTIFICIAL SEQUENCE
  Synthetic Construct
GKDGLK

SEQ ID NO: 12515 - protein, 6 aa, ARTIFICIAL SEQUENCE
  Synthetic Construct
GKDGNK

SEQ ID NO: 12516 - protein, 6 aa, ARTIFICIAL SEQUENCE
  Synthetic Construct
GKDGQK

SEQ ID NO: 12517 - protein, 6 aa, ARTIFICIAL SEQUENCE
  Synthetic Construct
GKDGRK

SEQ ID NO: 12518 - protein, 6 aa, ARTIFICIAL SEQUENCE
  Synthetic Construct
GKDGSK

SEQ ID NO: 12519 - protein, 6 aa, ARTIFICIAL SEQUENCE
  Synthetic Construct
GKDGTK

SEQ ID NO: 12520 - protein, 6 aa, ARTIFICIAL SEQUENCE
  Synthetic Construct
GKDGYK

SEQ ID NO: 12521 - protein, 6 aa, ARTIFICIAL SEQUENCE
  Synthetic Construct
GKDHAK

SEQ ID NO: 12522 - protein, 6 aa, ARTIFICIAL SEQUENCE
  Synthetic Construct
GKDHDK

SEQ ID NO: 12523 - protein, 6 aa, ARTIFICIAL SEQUENCE
  Synthetic Construct
GKDHEK

SEQ ID NO: 12524 - protein, 6 aa, ARTIFICIAL SEQUENCE
  Synthetic Construct
GKDHFK

SEQ ID NO: 12525 - protein, 6 aa, ARTIFICIAL SEQUENCE
  Synthetic Construct
GKDHGK

SEQ ID NO: 12526 - protein, 6 aa, ARTIFICIAL SEQUENCE
  Synthetic Construct
GKDHHK

SEQ ID NO: 12527 - protein, 6 aa, ARTIFICIAL SEQUENCE
  Synthetic Construct
GKDHIK

SEQ ID NO: 12528 - protein, 6 aa, ARTIFICIAL SEQUENCE
  Synthetic Construct
GKDHLK

SEQ ID NO: 12529 - protein, 6 aa, ARTIFICIAL SEQUENCE
  Synthetic Construct
GKDHNK

SEQ ID NO: 12530 - protein, 6 aa, ARTIFICIAL SEQUENCE
  Synthetic Construct
GKDHQK

SEQ ID NO: 12531 - protein, 6 aa, ARTIFICIAL SEQUENCE
  Synthetic Construct
GKDHRK

SEQ ID NO: 12532 - protein, 6 aa, ARTIFICIAL SEQUENCE
  Synthetic Construct
GKDHSK

SEQ ID NO: 12533 - protein, 6 aa, ARTIFICIAL SEQUENCE
  Synthetic Construct
GKDHTK

SEQ ID NO: 12534 - protein, 6 aa, ARTIFICIAL SEQUENCE
  Synthetic Construct
GKDHYK

SEQ ID NO: 12535 - protein, 6 aa, ARTIFICIAL SEQUENCE
  Synthetic Construct
GKDIAK

SEQ ID NO: 12536 - protein, 6 aa, ARTIFICIAL SEQUENCE
  Synthetic Construct
GKDIDK

SEQ ID NO: 12537 - protein, 6 aa, ARTIFICIAL SEQUENCE
  Synthetic Construct
GKDIEK

SEQ ID NO: 12538 - protein, 6 aa, ARTIFICIAL SEQUENCE
  Synthetic Construct
GKDIFK

SEQ ID NO: 12539 - protein, 6 aa, ARTIFICIAL SEQUENCE
  Synthetic Construct
GKDIGK

SEQ ID NO: 12540 - protein, 6 aa, ARTIFICIAL SEQUENCE
  Synthetic Construct
GKDIHK

SEQ ID NO: 12541 - protein, 6 aa, ARTIFICIAL SEQUENCE
  Synthetic Construct
GKDIIK

SEQ ID NO: 12542 - protein, 6 aa, ARTIFICIAL SEQUENCE
  Synthetic Construct
GKDILK

SEQ ID NO: 12543 - protein, 6 aa, ARTIFICIAL SEQUENCE
  Synthetic Construct
GKDINK

SEQ ID NO: 12544 - protein, 6 aa, ARTIFICIAL SEQUENCE
  Synthetic Construct
GKDIQK

SEQ ID NO: 12545 - protein, 6 aa, ARTIFICIAL SEQUENCE
  Synthetic Construct
GKDIRK

SEQ ID NO: 12546 - protein, 6 aa, ARTIFICIAL SEQUENCE
  Synthetic Construct
GKDISK

SEQ ID NO: 12547 - protein, 6 aa, ARTIFICIAL SEQUENCE
  Synthetic Construct
GKDITK

SEQ ID NO: 12548 - protein, 6 aa, ARTIFICIAL SEQUENCE
  Synthetic Construct
GKDIYK

SEQ ID NO: 12549 - protein, 6 aa, ARTIFICIAL SEQUENCE
  Synthetic Construct
GKDLAK

SEQ ID NO: 12550 - protein, 6 aa, ARTIFICIAL SEQUENCE
  Synthetic Construct
GKDLDK

SEQ ID NO: 12551 - protein, 6 aa, ARTIFICIAL SEQUENCE
  Synthetic Construct
GKDLEK

SEQ ID NO: 12552 - protein, 6 aa, ARTIFICIAL SEQUENCE
  Synthetic Construct
GKDLFK

SEQ ID NO: 12553 - protein, 6 aa, ARTIFICIAL SEQUENCE
  Synthetic Construct
GKDLGK

SEQ ID NO: 12554 - protein, 6 aa, ARTIFICIAL SEQUENCE
  Synthetic Construct
GKDLHK

SEQ ID NO: 12555 - protein, 6 aa, ARTIFICIAL SEQUENCE
  Synthetic Construct
GKDLIK

SEQ ID NO: 12556 - protein, 6 aa, ARTIFICIAL SEQUENCE
  Synthetic Construct
GKDLLK

SEQ ID NO: 12557 - protein, 6 aa, ARTIFICIAL SEQUENCE
  Synthetic Construct
GKDLNK

SEQ ID NO: 12558 - protein, 6 aa, ARTIFICIAL SEQUENCE
  Synthetic Construct
GKDLQK

SEQ ID NO: 12559 - protein, 6 aa, ARTIFICIAL SEQUENCE
  Synthetic Construct
GKDLRK

SEQ ID NO: 12560 - protein, 6 aa, ARTIFICIAL SEQUENCE
  Synthetic Construct
GKDLSK

SEQ ID NO: 12561 - protein, 6 aa, ARTIFICIAL SEQUENCE
  Synthetic Construct
GKDLTK

SEQ ID NO: 12562 - protein, 6 aa, ARTIFICIAL SEQUENCE
  Synthetic Construct
GKDLYK

SEQ ID NO: 12563 - protein, 6 aa, ARTIFICIAL SEQUENCE
  Synthetic Construct
GKDNAK

SEQ ID NO: 12564 - protein, 6 aa, ARTIFICIAL SEQUENCE
  Synthetic Construct
GKDNDK

SEQ ID NO: 12565 - protein, 6 aa, ARTIFICIAL SEQUENCE
  Synthetic Construct
GKDNEK

SEQ ID NO: 12566 - protein, 6 aa, ARTIFICIAL SEQUENCE
  Synthetic Construct
GKDNFK

SEQ ID NO: 12567 - protein, 6 aa, ARTIFICIAL SEQUENCE
  Synthetic Construct
GKDNGK

SEQ ID NO: 12568 - protein, 6 aa, ARTIFICIAL SEQUENCE
  Synthetic Construct
GKDNHK

SEQ ID NO: 12569 - protein, 6 aa, ARTIFICIAL SEQUENCE
  Synthetic Construct
GKDNIK

SEQ ID NO: 12570 - protein, 6 aa, ARTIFICIAL SEQUENCE
  Synthetic Construct
GKDNLK

SEQ ID NO: 12571 - protein, 6 aa, ARTIFICIAL SEQUENCE
  Synthetic Construct
GKDNNK

SEQ ID NO: 12572 - protein, 6 aa, ARTIFICIAL SEQUENCE
  Synthetic Construct
GKDNQK

SEQ ID NO: 12573 - protein, 6 aa, ARTIFICIAL SEQUENCE
  Synthetic Construct
GKDNRK

SEQ ID NO: 12574 - protein, 6 aa, ARTIFICIAL SEQUENCE
  Synthetic Construct
GKDNSK

SEQ ID NO: 12575 - protein, 6 aa, ARTIFICIAL SEQUENCE
  Synthetic Construct
GKDNTK

SEQ ID NO: 12576 - protein, 6 aa, ARTIFICIAL SEQUENCE
  Synthetic Construct
GKDNYK

SEQ ID NO: 12577 - protein, 6 aa, ARTIFICIAL SEQUENCE
  Synthetic Construct
GKDQAK

SEQ ID NO: 12578 - protein, 6 aa, ARTIFICIAL SEQUENCE
  Synthetic Construct
GKDQDK

SEQ ID NO: 12579 - protein, 6 aa, ARTIFICIAL SEQUENCE
  Synthetic Construct
GKDQEK

SEQ ID NO: 12580 - protein, 6 aa, ARTIFICIAL SEQUENCE
  Synthetic Construct
GKDQFK

SEQ ID NO: 12581 - protein, 6 aa, ARTIFICIAL SEQUENCE
  Synthetic Construct
GKDQGK

SEQ ID NO: 12582 - protein, 6 aa, ARTIFICIAL SEQUENCE
  Synthetic Construct
GKDQHK

SEQ ID NO: 12583 - protein, 6 aa, ARTIFICIAL SEQUENCE
  Synthetic Construct
GKDQIK

SEQ ID NO: 12584 - protein, 6 aa, ARTIFICIAL SEQUENCE
  Synthetic Construct
GKDQLK

SEQ ID NO: 12585 - protein, 6 aa, ARTIFICIAL SEQUENCE
  Synthetic Construct
GKDQNK

SEQ ID NO: 12586 - protein, 6 aa, ARTIFICIAL SEQUENCE
  Synthetic Construct
GKDQQK

SEQ ID NO: 12587 - protein, 6 aa, ARTIFICIAL SEQUENCE
  Synthetic Construct
GKDQRK

SEQ ID NO: 12588 - protein, 6 aa, ARTIFICIAL SEQUENCE
  Synthetic Construct
GKDQSK

SEQ ID NO: 12589 - protein, 6 aa, ARTIFICIAL SEQUENCE
  Synthetic Construct
GKDQTK

SEQ ID NO: 12590 - protein, 6 aa, ARTIFICIAL SEQUENCE
  Synthetic Construct
GKDQYK

SEQ ID NO: 12591 - protein, 6 aa, ARTIFICIAL SEQUENCE
  Synthetic Construct
GKDRAK

SEQ ID NO: 12592 - protein, 6 aa, ARTIFICIAL SEQUENCE
  Synthetic Construct
GKDRDK

SEQ ID NO: 12593 - protein, 6 aa, ARTIFICIAL SEQUENCE
  Synthetic Construct
GKDREK

SEQ ID NO: 12594 - protein, 6 aa, ARTIFICIAL SEQUENCE
  Synthetic Construct
GKDRFK

SEQ ID NO: 12595 - protein, 6 aa, ARTIFICIAL SEQUENCE
  Synthetic Construct
GKDRGK

SEQ ID NO: 12596 - protein, 6 aa, ARTIFICIAL SEQUENCE
  Synthetic Construct
GKDRHK

SEQ ID NO: 12597 - protein, 6 aa, ARTIFICIAL SEQUENCE
  Synthetic Construct
GKDRIK

SEQ ID NO: 12598 - protein, 6 aa, ARTIFICIAL SEQUENCE
  Synthetic Construct
GKDRLK

SEQ ID NO: 12599 - protein, 6 aa, ARTIFICIAL SEQUENCE
  Synthetic Construct
GKDRNK

SEQ ID NO: 12600 - protein, 6 aa, ARTIFICIAL SEQUENCE
  Synthetic Construct
GKDRQK

SEQ ID NO: 12601 - protein, 6 aa, ARTIFICIAL SEQUENCE
  Synthetic Construct
GKDRRK

SEQ ID NO: 12602 - protein, 6 aa, ARTIFICIAL SEQUENCE
  Synthetic Construct
GKDRSK

SEQ ID NO: 12603 - protein, 6 aa, ARTIFICIAL SEQUENCE
  Synthetic Construct
GKDRTK

SEQ ID NO: 12604 - protein, 6 aa, ARTIFICIAL SEQUENCE
  Synthetic Construct
GKDRYK

SEQ ID NO: 12605 - protein, 6 aa, ARTIFICIAL SEQUENCE
  Synthetic Construct
GKDSAK

SEQ ID NO: 12606 - protein, 6 aa, ARTIFICIAL SEQUENCE
  Synthetic Construct
GKDSDK

SEQ ID NO: 12607 - protein, 6 aa, ARTIFICIAL SEQUENCE
  Synthetic Construct
GKDSEK

SEQ ID NO: 12608 - protein, 6 aa, ARTIFICIAL SEQUENCE
  Synthetic Construct
GKDSFK

SEQ ID NO: 12609 - protein, 6 aa, ARTIFICIAL SEQUENCE
  Synthetic Construct
GKDSGK

SEQ ID NO: 12610 - protein, 6 aa, ARTIFICIAL SEQUENCE
  Synthetic Construct
GKDSHK

SEQ ID NO: 12611 - protein, 6 aa, ARTIFICIAL SEQUENCE
  Synthetic Construct
GKDSIK

SEQ ID NO: 12612 - protein, 6 aa, ARTIFICIAL SEQUENCE
  Synthetic Construct
GKDSLK

SEQ ID NO: 12613 - protein, 6 aa, ARTIFICIAL SEQUENCE
  Synthetic Construct
GKDSNK

SEQ ID NO: 12614 - protein, 6 aa, ARTIFICIAL SEQUENCE
  Synthetic Construct
GKDSQK

SEQ ID NO: 12615 - protein, 6 aa, ARTIFICIAL SEQUENCE
  Synthetic Construct
GKDSRK

SEQ ID NO: 12616 - protein, 6 aa, ARTIFICIAL SEQUENCE
  Synthetic Construct
GKDSSK

SEQ ID NO: 12617 - protein, 6 aa, ARTIFICIAL SEQUENCE
  Synthetic Construct
GKDSTK

SEQ ID NO: 12618 - protein, 6 aa, ARTIFICIAL SEQUENCE
  Synthetic Construct
GKDSYK

SEQ ID NO: 12619 - protein, 6 aa, ARTIFICIAL SEQUENCE
  Synthetic Construct
GKDTAK

SEQ ID NO: 12620 - protein, 6 aa, ARTIFICIAL SEQUENCE
  Synthetic Construct
GKDTDK

SEQ ID NO: 12621 - protein, 6 aa, ARTIFICIAL SEQUENCE
  Synthetic Construct
GKDTEK

SEQ ID NO: 12622 - protein, 6 aa, ARTIFICIAL SEQUENCE
  Synthetic Construct
GKDTFK

SEQ ID NO: 12623 - protein, 6 aa, ARTIFICIAL SEQUENCE
  Synthetic Construct
GKDTGK

SEQ ID NO: 12624 - protein, 6 aa, ARTIFICIAL SEQUENCE
  Synthetic Construct
GKDTHK

SEQ ID NO: 12625 - protein, 6 aa, ARTIFICIAL SEQUENCE
  Synthetic Construct
GKDTIK

SEQ ID NO: 12626 - protein, 6 aa, ARTIFICIAL SEQUENCE
  Synthetic Construct
GKDTLK

SEQ ID NO: 12627 - protein, 6 aa, ARTIFICIAL SEQUENCE
  Synthetic Construct
GKDTNK

SEQ ID NO: 12628 - protein, 6 aa, ARTIFICIAL SEQUENCE
  Synthetic Construct
GKDTQK

SEQ ID NO: 12629 - protein, 6 aa, ARTIFICIAL SEQUENCE
  Synthetic Construct
GKDTRK

SEQ ID NO: 12630 - protein, 6 aa, ARTIFICIAL SEQUENCE
  Synthetic Construct
GKDTSK

SEQ ID NO: 12631 - protein, 6 aa, ARTIFICIAL SEQUENCE
  Synthetic Construct
GKDTTK

SEQ ID NO: 12632 - protein, 6 aa, ARTIFICIAL SEQUENCE
  Synthetic Construct
GKDTYK

SEQ ID NO: 12633 - protein, 6 aa, ARTIFICIAL SEQUENCE
  Synthetic Construct
GKDYAK

SEQ ID NO: 12634 - protein, 6 aa, ARTIFICIAL SEQUENCE
  Synthetic Construct
GKDYDK

SEQ ID NO: 12635 - protein, 6 aa, ARTIFICIAL SEQUENCE
  Synthetic Construct
GKDYEK

SEQ ID NO: 12636 - protein, 6 aa, ARTIFICIAL SEQUENCE
  Synthetic Construct
GKDYFK

SEQ ID NO: 12637 - protein, 6 aa, ARTIFICIAL SEQUENCE
  Synthetic Construct
GKDYGK

SEQ ID NO: 12638 - protein, 6 aa, ARTIFICIAL SEQUENCE
  Synthetic Construct
GKDYHK

SEQ ID NO: 12639 - protein, 6 aa, ARTIFICIAL SEQUENCE
  Synthetic Construct
GKDYIK

SEQ ID NO: 12640 - protein, 6 aa, ARTIFICIAL SEQUENCE
  Synthetic Construct
GKDYLK

SEQ ID NO: 12641 - protein, 6 aa, ARTIFICIAL SEQUENCE
  Synthetic Construct
GKDYNK

SEQ ID NO: 12642 - protein, 6 aa, ARTIFICIAL SEQUENCE
  Synthetic Construct
GKDYQK

SEQ ID NO: 12643 - protein, 6 aa, ARTIFICIAL SEQUENCE
  Synthetic Construct
GKDYRK

SEQ ID NO: 12644 - protein, 6 aa, ARTIFICIAL SEQUENCE
  Synthetic Construct
GKDYSK

SEQ ID NO: 12645 - protein, 6 aa, ARTIFICIAL SEQUENCE
  Synthetic Construct
GKDYTK

SEQ ID NO: 12646 - protein, 6 aa, ARTIFICIAL SEQUENCE
  Synthetic Construct
GKDYYK

SEQ ID NO: 12647 - protein, 6 aa, ARTIFICIAL SEQUENCE
  Synthetic Construct
GKEAAK

SEQ ID NO: 12648 - protein, 6 aa, ARTIFICIAL SEQUENCE
  Synthetic Construct
GKEADK

SEQ ID NO: 12649 - protein, 6 aa, ARTIFICIAL SEQUENCE
  Synthetic Construct
GKEAEK

SEQ ID NO: 12650 - protein, 6 aa, ARTIFICIAL SEQUENCE
  Synthetic Construct
GKEAFK

SEQ ID NO: 12651 - protein, 6 aa, ARTIFICIAL SEQUENCE
  Synthetic Construct
GKEAGK

SEQ ID NO: 12652 - protein, 6 aa, ARTIFICIAL SEQUENCE
  Synthetic Construct
GKEAHK

SEQ ID NO: 12653 - protein, 6 aa, ARTIFICIAL SEQUENCE
  Synthetic Construct
GKEAIK

SEQ ID NO: 12654 - protein, 6 aa, ARTIFICIAL SEQUENCE
  Synthetic Construct
GKEALK

SEQ ID NO: 12655 - protein, 6 aa, ARTIFICIAL SEQUENCE
  Synthetic Construct
GKEANK

SEQ ID NO: 12656 - protein, 6 aa, ARTIFICIAL SEQUENCE
  Synthetic Construct
GKEAQK

SEQ ID NO: 12657 - protein, 6 aa, ARTIFICIAL SEQUENCE
  Synthetic Construct
GKEARK

SEQ ID NO: 12658 - protein, 6 aa, ARTIFICIAL SEQUENCE
  Synthetic Construct
GKEASK

SEQ ID NO: 12659 - protein, 6 aa, ARTIFICIAL SEQUENCE
  Synthetic Construct
GKEATK

SEQ ID NO: 12660 - protein, 6 aa, ARTIFICIAL SEQUENCE
  Synthetic Construct
GKEAYK

SEQ ID NO: 12661 - protein, 6 aa, ARTIFICIAL SEQUENCE
  Synthetic Construct
GKEDAK

SEQ ID NO: 12662 - protein, 6 aa, ARTIFICIAL SEQUENCE
  Synthetic Construct
GKEDDK

SEQ ID NO: 12663 - protein, 6 aa, ARTIFICIAL SEQUENCE
  Synthetic Construct
GKEDEK

SEQ ID NO: 12664 - protein, 6 aa, ARTIFICIAL SEQUENCE
  Synthetic Construct
GKEDFK

SEQ ID NO: 12665 - protein, 6 aa, ARTIFICIAL SEQUENCE
  Synthetic Construct
GKEDGK

SEQ ID NO: 12666 - protein, 6 aa, ARTIFICIAL SEQUENCE
  Synthetic Construct
GKEDHK

SEQ ID NO: 12667 - protein, 6 aa, ARTIFICIAL SEQUENCE
  Synthetic Construct
GKEDIK

SEQ ID NO: 12668 - protein, 6 aa, ARTIFICIAL SEQUENCE
  Synthetic Construct
GKEDLK

SEQ ID NO: 12669 - protein, 6 aa, ARTIFICIAL SEQUENCE
  Synthetic Construct
GKEDNK

SEQ ID NO: 12670 - protein, 6 aa, ARTIFICIAL SEQUENCE
  Synthetic Construct
GKEDQK

SEQ ID NO: 12671 - protein, 6 aa, ARTIFICIAL SEQUENCE
  Synthetic Construct
GKEDRK

SEQ ID NO: 12672 - protein, 6 aa, ARTIFICIAL SEQUENCE
  Synthetic Construct
GKEDSK

SEQ ID NO: 12673 - protein, 6 aa, ARTIFICIAL SEQUENCE
  Synthetic Construct
GKEDTK

SEQ ID NO: 12674 - protein, 6 aa, ARTIFICIAL SEQUENCE
  Synthetic Construct
GKEDYK

SEQ ID NO: 12675 - protein, 6 aa, ARTIFICIAL SEQUENCE
  Synthetic Construct
GKEEAK

SEQ ID NO: 12676 - protein, 6 aa, ARTIFICIAL SEQUENCE
  Synthetic Construct
GKEEDK

SEQ ID NO: 12677 - protein, 6 aa, ARTIFICIAL SEQUENCE
  Synthetic Construct
GKEEEK

SEQ ID NO: 12678 - protein, 6 aa, ARTIFICIAL SEQUENCE
  Synthetic Construct
GKEEFK

SEQ ID NO: 12679 - protein, 6 aa, ARTIFICIAL SEQUENCE
  Synthetic Construct
GKEEGK

SEQ ID NO: 12680 - protein, 6 aa, ARTIFICIAL SEQUENCE
  Synthetic Construct
GKEEHK

SEQ ID NO: 12681 - protein, 6 aa, ARTIFICIAL SEQUENCE
  Synthetic Construct
GKEEIK

SEQ ID NO: 12682 - protein, 6 aa, ARTIFICIAL SEQUENCE
  Synthetic Construct
GKEELK

SEQ ID NO: 12683 - protein, 6 aa, ARTIFICIAL SEQUENCE
  Synthetic Construct
GKEENK

SEQ ID NO: 12684 - protein, 6 aa, ARTIFICIAL SEQUENCE
  Synthetic Construct
GKEEQK

SEQ ID NO: 12685 - protein, 6 aa, ARTIFICIAL SEQUENCE
  Synthetic Construct
GKEERK

SEQ ID NO: 12686 - protein, 6 aa, ARTIFICIAL SEQUENCE
  Synthetic Construct
GKEESK

SEQ ID NO: 12687 - protein, 6 aa, ARTIFICIAL SEQUENCE
  Synthetic Construct
GKEETK

SEQ ID NO: 12688 - protein, 6 aa, ARTIFICIAL SEQUENCE
  Synthetic Construct
GKEEYK

SEQ ID NO: 12689 - protein, 6 aa, ARTIFICIAL SEQUENCE
  Synthetic Construct
GKEFAK

SEQ ID NO: 12690 - protein, 6 aa, ARTIFICIAL SEQUENCE
  Synthetic Construct
GKEFDK

SEQ ID NO: 12691 - protein, 6 aa, ARTIFICIAL SEQUENCE
  Synthetic Construct
GKEFEK

SEQ ID NO: 12692 - protein, 6 aa, ARTIFICIAL SEQUENCE
  Synthetic Construct
GKEFFK

SEQ ID NO: 12693 - protein, 6 aa, ARTIFICIAL SEQUENCE
  Synthetic Construct
GKEFGK

SEQ ID NO: 12694 - protein, 6 aa, ARTIFICIAL SEQUENCE
  Synthetic Construct
GKEFHK

SEQ ID NO: 12695 - protein, 6 aa, ARTIFICIAL SEQUENCE
  Synthetic Construct
GKEFIK

SEQ ID NO: 12696 - protein, 6 aa, ARTIFICIAL SEQUENCE
  Synthetic Construct
GKEFLK

SEQ ID NO: 12697 - protein, 6 aa, ARTIFICIAL SEQUENCE
  Synthetic Construct
GKEFNK

SEQ ID NO: 12698 - protein, 6 aa, ARTIFICIAL SEQUENCE
  Synthetic Construct
GKEFQK

SEQ ID NO: 12699 - protein, 6 aa, ARTIFICIAL SEQUENCE
  Synthetic Construct
GKEFRK

SEQ ID NO: 12700 - protein, 6 aa, ARTIFICIAL SEQUENCE
  Synthetic Construct
GKEFSK

SEQ ID NO: 12701 - protein, 6 aa, ARTIFICIAL SEQUENCE
  Synthetic Construct
GKEFTK

SEQ ID NO: 12702 - protein, 6 aa, ARTIFICIAL SEQUENCE
  Synthetic Construct
GKEFYK

SEQ ID NO: 12703 - protein, 6 aa, ARTIFICIAL SEQUENCE
  Synthetic Construct
GKEGAK

SEQ ID NO: 12704 - protein, 6 aa, ARTIFICIAL SEQUENCE
  Synthetic Construct
GKEGDK

SEQ ID NO: 12705 - protein, 6 aa, ARTIFICIAL SEQUENCE
  Synthetic Construct
GKEGEK

SEQ ID NO: 12706 - protein, 6 aa, ARTIFICIAL SEQUENCE
  Synthetic Construct
GKEGFK

SEQ ID NO: 12707 - protein, 6 aa, ARTIFICIAL SEQUENCE
  Synthetic Construct
GKEGGK

SEQ ID NO: 12708 - protein, 6 aa, ARTIFICIAL SEQUENCE
  Synthetic Construct
GKEGHK

SEQ ID NO: 12709 - protein, 6 aa, ARTIFICIAL SEQUENCE
  Synthetic Construct
GKEGIK

SEQ ID NO: 12710 - protein, 6 aa, ARTIFICIAL SEQUENCE
  Synthetic Construct
GKEGLK

SEQ ID NO: 12711 - protein, 6 aa, ARTIFICIAL SEQUENCE
  Synthetic Construct
GKEGNK

SEQ ID NO: 12712 - protein, 6 aa, ARTIFICIAL SEQUENCE
  Synthetic Construct
GKEGQK

SEQ ID NO: 12713 - protein, 6 aa, ARTIFICIAL SEQUENCE
  Synthetic Construct
GKEGRK

SEQ ID NO: 12714 - protein, 6 aa, ARTIFICIAL SEQUENCE
  Synthetic Construct
GKEGSK

SEQ ID NO: 12715 - protein, 6 aa, ARTIFICIAL SEQUENCE
  Synthetic Construct
GKEGTK

SEQ ID NO: 12716 - protein, 6 aa, ARTIFICIAL SEQUENCE
  Synthetic Construct
GKEGYK

SEQ ID NO: 12717 - protein, 6 aa, ARTIFICIAL SEQUENCE
  Synthetic Construct
GKEHAK

SEQ ID NO: 12718 - protein, 6 aa, ARTIFICIAL SEQUENCE
  Synthetic Construct
GKEHDK

SEQ ID NO: 12719 - protein, 6 aa, ARTIFICIAL SEQUENCE
  Synthetic Construct
GKEHEK

SEQ ID NO: 12720 - protein, 6 aa, ARTIFICIAL SEQUENCE
  Synthetic Construct
GKEHFK

SEQ ID NO: 12721 - protein, 6 aa, ARTIFICIAL SEQUENCE
  Synthetic Construct
GKEHGK

SEQ ID NO: 12722 - protein, 6 aa, ARTIFICIAL SEQUENCE
  Synthetic Construct
GKEHHK

SEQ ID NO: 12723 - protein, 6 aa, ARTIFICIAL SEQUENCE
  Synthetic Construct
GKEHIK

SEQ ID NO: 12724 - protein, 6 aa, ARTIFICIAL SEQUENCE
  Synthetic Construct
GKEHLK

SEQ ID NO: 12725 - protein, 6 aa, ARTIFICIAL SEQUENCE
  Synthetic Construct
GKEHNK

SEQ ID NO: 12726 - protein, 6 aa, ARTIFICIAL SEQUENCE
  Synthetic Construct
GKEHQK

SEQ ID NO: 12727 - protein, 6 aa, ARTIFICIAL SEQUENCE
  Synthetic Construct
GKEHRK

SEQ ID NO: 12728 - protein, 6 aa, ARTIFICIAL SEQUENCE
  Synthetic Construct
GKEHSK

SEQ ID NO: 12729 - protein, 6 aa, ARTIFICIAL SEQUENCE
  Synthetic Construct
GKEHTK

SEQ ID NO: 12730 - protein, 6 aa, ARTIFICIAL SEQUENCE
  Synthetic Construct
GKEHYK

SEQ ID NO: 12731 - protein, 6 aa, ARTIFICIAL SEQUENCE
  Synthetic Construct
GKEIAK

SEQ ID NO: 12732 - protein, 6 aa, ARTIFICIAL SEQUENCE
  Synthetic Construct
GKEIDK

SEQ ID NO: 12733 - protein, 6 aa, ARTIFICIAL SEQUENCE
  Synthetic Construct
GKEIEK

SEQ ID NO: 12734 - protein, 6 aa, ARTIFICIAL SEQUENCE
  Synthetic Construct
GKEIFK

SEQ ID NO: 12735 - protein, 6 aa, ARTIFICIAL SEQUENCE
  Synthetic Construct
GKEIGK

SEQ ID NO: 12736 - protein, 6 aa, ARTIFICIAL SEQUENCE
  Synthetic Construct
GKEIHK

SEQ ID NO: 12737 - protein, 6 aa, ARTIFICIAL SEQUENCE
  Synthetic Construct
GKEIIK

SEQ ID NO: 12738 - protein, 6 aa, ARTIFICIAL SEQUENCE
  Synthetic Construct
GKEILK

SEQ ID NO: 12739 - protein, 6 aa, ARTIFICIAL SEQUENCE
  Synthetic Construct
GKEINK

SEQ ID NO: 12740 - protein, 6 aa, ARTIFICIAL SEQUENCE
  Synthetic Construct
GKEIQK

SEQ ID NO: 12741 - protein, 6 aa, ARTIFICIAL SEQUENCE
  Synthetic Construct
GKEIRK

SEQ ID NO: 12742 - protein, 6 aa, ARTIFICIAL SEQUENCE
  Synthetic Construct
GKEISK

SEQ ID NO: 12743 - protein, 6 aa, ARTIFICIAL SEQUENCE
  Synthetic Construct
GKEITK

SEQ ID NO: 12744 - protein, 6 aa, ARTIFICIAL SEQUENCE
  Synthetic Construct
GKEIYK

SEQ ID NO: 12745 - protein, 6 aa, ARTIFICIAL SEQUENCE
  Synthetic Construct
GKELAK

SEQ ID NO: 12746 - protein, 6 aa, ARTIFICIAL SEQUENCE
  Synthetic Construct
GKELDK

SEQ ID NO: 12747 - protein, 6 aa, ARTIFICIAL SEQUENCE
  Synthetic Construct
GKELEK

SEQ ID NO: 12748 - protein, 6 aa, ARTIFICIAL SEQUENCE
  Synthetic Construct
GKELFK

SEQ ID NO: 12749 - protein, 6 aa, ARTIFICIAL SEQUENCE
  Synthetic Construct
GKELGK

SEQ ID NO: 12750 - protein, 6 aa, ARTIFICIAL SEQUENCE
  Synthetic Construct
GKELHK

SEQ ID NO: 12751 - protein, 6 aa, ARTIFICIAL SEQUENCE
  Synthetic Construct
GKELIK

SEQ ID NO: 12752 - protein, 6 aa, ARTIFICIAL SEQUENCE
  Synthetic Construct
GKELLK

SEQ ID NO: 12753 - protein, 6 aa, ARTIFICIAL SEQUENCE
  Synthetic Construct
GKELNK

SEQ ID NO: 12754 - protein, 6 aa, ARTIFICIAL SEQUENCE
  Synthetic Construct
GKELQK

SEQ ID NO: 12755 - protein, 6 aa, ARTIFICIAL SEQUENCE
  Synthetic Construct
GKELRK

SEQ ID NO: 12756 - protein, 6 aa, ARTIFICIAL SEQUENCE
  Synthetic Construct
GKELSK

SEQ ID NO: 12757 - protein, 6 aa, ARTIFICIAL SEQUENCE
  Synthetic Construct
GKELTK

SEQ ID NO: 12758 - protein, 6 aa, ARTIFICIAL SEQUENCE
  Synthetic Construct
GKELYK

SEQ ID NO: 12759 - protein, 6 aa, ARTIFICIAL SEQUENCE
  Synthetic Construct
GKENAK

SEQ ID NO: 12760 - protein, 6 aa, ARTIFICIAL SEQUENCE
  Synthetic Construct
GKENDK

SEQ ID NO: 12761 - protein, 6 aa, ARTIFICIAL SEQUENCE
  Synthetic Construct
GKENEK

SEQ ID NO: 12762 - protein, 6 aa, ARTIFICIAL SEQUENCE
  Synthetic Construct
GKENFK

SEQ ID NO: 12763 - protein, 6 aa, ARTIFICIAL SEQUENCE
  Synthetic Construct
GKENGK

SEQ ID NO: 12764 - protein, 6 aa, ARTIFICIAL SEQUENCE
  Synthetic Construct
GKENHK

SEQ ID NO: 12765 - protein, 6 aa, ARTIFICIAL SEQUENCE
  Synthetic Construct
GKENIK

SEQ ID NO: 12766 - protein, 6 aa, ARTIFICIAL SEQUENCE
  Synthetic Construct
GKENLK

SEQ ID NO: 12767 - protein, 6 aa, ARTIFICIAL SEQUENCE
  Synthetic Construct
GKENNK

SEQ ID NO: 12768 - protein, 6 aa, ARTIFICIAL SEQUENCE
  Synthetic Construct
GKENQK

SEQ ID NO: 12769 - protein, 6 aa, ARTIFICIAL SEQUENCE
  Synthetic Construct
GKENRK

SEQ ID NO: 12770 - protein, 6 aa, ARTIFICIAL SEQUENCE
  Synthetic Construct
GKENSK

SEQ ID NO: 12771 - protein, 6 aa, ARTIFICIAL SEQUENCE
  Synthetic Construct
GKENTK

SEQ ID NO: 12772 - protein, 6 aa, ARTIFICIAL SEQUENCE
  Synthetic Construct
GKENYK

SEQ ID NO: 12773 - protein, 6 aa, ARTIFICIAL SEQUENCE
  Synthetic Construct
GKEQAK

SEQ ID NO: 12774 - protein, 6 aa, ARTIFICIAL SEQUENCE
  Synthetic Construct
GKEQDK

SEQ ID NO: 12775 - protein, 6 aa, ARTIFICIAL SEQUENCE
  Synthetic Construct
GKEQEK

SEQ ID NO: 12776 - protein, 6 aa, ARTIFICIAL SEQUENCE
  Synthetic Construct
GKEQFK

SEQ ID NO: 12777 - protein, 6 aa, ARTIFICIAL SEQUENCE
  Synthetic Construct
GKEQGK

SEQ ID NO: 12778 - protein, 6 aa, ARTIFICIAL SEQUENCE
  Synthetic Construct
GKEQHK

SEQ ID NO: 12779 - protein, 6 aa, ARTIFICIAL SEQUENCE
  Synthetic Construct
GKEQIK

SEQ ID NO: 12780 - protein, 6 aa, ARTIFICIAL SEQUENCE
  Synthetic Construct
GKEQLK

SEQ ID NO: 12781 - protein, 6 aa, ARTIFICIAL SEQUENCE
  Synthetic Construct
GKEQNK

SEQ ID NO: 12782 - protein, 6 aa, ARTIFICIAL SEQUENCE
  Synthetic Construct
GKEQQK

SEQ ID NO: 12783 - protein, 6 aa, ARTIFICIAL SEQUENCE
  Synthetic Construct
GKEQRK

SEQ ID NO: 12784 - protein, 6 aa, ARTIFICIAL SEQUENCE
  Synthetic Construct
GKEQSK

SEQ ID NO: 12785 - protein, 6 aa, ARTIFICIAL SEQUENCE
  Synthetic Construct
GKEQTK

SEQ ID NO: 12786 - protein, 6 aa, ARTIFICIAL SEQUENCE
  Synthetic Construct
GKEQYK

SEQ ID NO: 12787 - protein, 6 aa, ARTIFICIAL SEQUENCE
  Synthetic Construct
GKERAK

SEQ ID NO: 12788 - protein, 6 aa, ARTIFICIAL SEQUENCE
  Synthetic Construct
GKERDK

SEQ ID NO: 12789 - protein, 6 aa, ARTIFICIAL SEQUENCE
  Synthetic Construct
GKEREK

SEQ ID NO: 12790 - protein, 6 aa, ARTIFICIAL SEQUENCE
  Synthetic Construct
GKERFK

SEQ ID NO: 12791 - protein, 6 aa, ARTIFICIAL SEQUENCE
  Synthetic Construct
GKERGK

SEQ ID NO: 12792 - protein, 6 aa, ARTIFICIAL SEQUENCE
  Synthetic Construct
GKERHK

SEQ ID NO: 12793 - protein, 6 aa, ARTIFICIAL SEQUENCE
  Synthetic Construct
GKERIK

SEQ ID NO: 12794 - protein, 6 aa, ARTIFICIAL SEQUENCE
  Synthetic Construct
GKERLK

SEQ ID NO: 12795 - protein, 6 aa, ARTIFICIAL SEQUENCE
  Synthetic Construct
GKERNK

SEQ ID NO: 12796 - protein, 6 aa, ARTIFICIAL SEQUENCE
  Synthetic Construct
GKERQK

SEQ ID NO: 12797 - protein, 6 aa, ARTIFICIAL SEQUENCE
  Synthetic Construct
GKERRK

SEQ ID NO: 12798 - protein, 6 aa, ARTIFICIAL SEQUENCE
  Synthetic Construct
GKERSK

SEQ ID NO: 12799 - protein, 6 aa, ARTIFICIAL SEQUENCE
  Synthetic Construct
GKERTK

SEQ ID NO: 12800 - protein, 6 aa, ARTIFICIAL SEQUENCE
  Synthetic Construct
GKERYK

SEQ ID NO: 12801 - protein, 6 aa, ARTIFICIAL SEQUENCE
  Synthetic Construct
GKESAK

SEQ ID NO: 12802 - protein, 6 aa, ARTIFICIAL SEQUENCE
  Synthetic Construct
GKESDK

SEQ ID NO: 12803 - protein, 6 aa, ARTIFICIAL SEQUENCE
  Synthetic Construct
GKESEK

SEQ ID NO: 12804 - protein, 6 aa, ARTIFICIAL SEQUENCE
  Synthetic Construct
GKESFK

SEQ ID NO: 12805 - protein, 6 aa, ARTIFICIAL SEQUENCE
  Synthetic Construct
GKESGK

SEQ ID NO: 12806 - protein, 6 aa, ARTIFICIAL SEQUENCE
  Synthetic Construct
GKESHK

SEQ ID NO: 12807 - protein, 6 aa, ARTIFICIAL SEQUENCE
  Synthetic Construct
GKESIK

SEQ ID NO: 12808 - protein, 6 aa, ARTIFICIAL SEQUENCE
  Synthetic Construct
GKESLK

SEQ ID NO: 12809 - protein, 6 aa, ARTIFICIAL SEQUENCE
  Synthetic Construct
GKESNK

SEQ ID NO: 12810 - protein, 6 aa, ARTIFICIAL SEQUENCE
  Synthetic Construct
GKESQK

SEQ ID NO: 12811 - protein, 6 aa, ARTIFICIAL SEQUENCE
  Synthetic Construct
GKESRK

SEQ ID NO: 12812 - protein, 6 aa, ARTIFICIAL SEQUENCE
  Synthetic Construct
GKESSK

SEQ ID NO: 12813 - protein, 6 aa, ARTIFICIAL SEQUENCE
  Synthetic Construct
GKESTK

SEQ ID NO: 12814 - protein, 6 aa, ARTIFICIAL SEQUENCE
  Synthetic Construct
GKESYK

SEQ ID NO: 12815 - protein, 6 aa, ARTIFICIAL SEQUENCE
  Synthetic Construct
GKETAK

SEQ ID NO: 12816 - protein, 6 aa, ARTIFICIAL SEQUENCE
  Synthetic Construct
GKETDK

SEQ ID NO: 12817 - protein, 6 aa, ARTIFICIAL SEQUENCE
  Synthetic Construct
GKETEK

SEQ ID NO: 12818 - protein, 6 aa, ARTIFICIAL SEQUENCE
  Synthetic Construct
GKETFK

SEQ ID NO: 12819 - protein, 6 aa, ARTIFICIAL SEQUENCE
  Synthetic Construct
GKETGK

SEQ ID NO: 12820 - protein, 6 aa, ARTIFICIAL SEQUENCE
  Synthetic Construct
GKETHK

SEQ ID NO: 12821 - protein, 6 aa, ARTIFICIAL SEQUENCE
  Synthetic Construct
GKETIK

SEQ ID NO: 12822 - protein, 6 aa, ARTIFICIAL SEQUENCE
  Synthetic Construct
GKETLK

SEQ ID NO: 12823 - protein, 6 aa, ARTIFICIAL SEQUENCE
  Synthetic Construct
GKETNK

SEQ ID NO: 12824 - protein, 6 aa, ARTIFICIAL SEQUENCE
  Synthetic Construct
GKETQK

SEQ ID NO: 12825 - protein, 6 aa, ARTIFICIAL SEQUENCE
  Synthetic Construct
GKETRK

SEQ ID NO: 12826 - protein, 6 aa, ARTIFICIAL SEQUENCE
  Synthetic Construct
GKETSK

SEQ ID NO: 12827 - protein, 6 aa, ARTIFICIAL SEQUENCE
  Synthetic Construct
GKETTK

SEQ ID NO: 12828 - protein, 6 aa, ARTIFICIAL SEQUENCE
  Synthetic Construct
GKETYK

SEQ ID NO: 12829 - protein, 6 aa, ARTIFICIAL SEQUENCE
  Synthetic Construct
GKEYAK

SEQ ID NO: 12830 - protein, 6 aa, ARTIFICIAL SEQUENCE
  Synthetic Construct
GKEYDK

SEQ ID NO: 12831 - protein, 6 aa, ARTIFICIAL SEQUENCE
  Synthetic Construct
GKEYEK

SEQ ID NO: 12832 - protein, 6 aa, ARTIFICIAL SEQUENCE
  Synthetic Construct
GKEYFK

SEQ ID NO: 12833 - protein, 6 aa, ARTIFICIAL SEQUENCE
  Synthetic Construct
GKEYGK

SEQ ID NO: 12834 - protein, 6 aa, ARTIFICIAL SEQUENCE
  Synthetic Construct
GKEYHK

SEQ ID NO: 12835 - protein, 6 aa, ARTIFICIAL SEQUENCE
  Synthetic Construct
GKEYIK

SEQ ID NO: 12836 - protein, 6 aa, ARTIFICIAL SEQUENCE
  Synthetic Construct
GKEYLK

SEQ ID NO: 12837 - protein, 6 aa, ARTIFICIAL SEQUENCE
  Synthetic Construct
GKEYNK

SEQ ID NO: 12838 - protein, 6 aa, ARTIFICIAL SEQUENCE
  Synthetic Construct
GKEYQK

SEQ ID NO: 12839 - protein, 6 aa, ARTIFICIAL SEQUENCE
  Synthetic Construct
GKEYRK

SEQ ID NO: 12840 - protein, 6 aa, ARTIFICIAL SEQUENCE
  Synthetic Construct
GKEYSK

SEQ ID NO: 12841 - protein, 6 aa, ARTIFICIAL SEQUENCE
  Synthetic Construct
GKEYTK

SEQ ID NO: 12842 - protein, 6 aa, ARTIFICIAL SEQUENCE
  Synthetic Construct
GKEYYK

SEQ ID NO: 12843 - protein, 6 aa, ARTIFICIAL SEQUENCE
  Synthetic Construct
GKFAAK

SEQ ID NO: 12844 - protein, 6 aa, ARTIFICIAL SEQUENCE
  Synthetic Construct
GKFADK

SEQ ID NO: 12845 - protein, 6 aa, ARTIFICIAL SEQUENCE
  Synthetic Construct
GKFAEK

SEQ ID NO: 12846 - protein, 6 aa, ARTIFICIAL SEQUENCE
  Synthetic Construct
GKFAFK

SEQ ID NO: 12847 - protein, 6 aa, ARTIFICIAL SEQUENCE
  Synthetic Construct
GKFAGK

SEQ ID NO: 12848 - protein, 6 aa, ARTIFICIAL SEQUENCE
  Synthetic Construct
GKFAHK

SEQ ID NO: 12849 - protein, 6 aa, ARTIFICIAL SEQUENCE
  Synthetic Construct
GKFAIK

SEQ ID NO: 12850 - protein, 6 aa, ARTIFICIAL SEQUENCE
  Synthetic Construct
GKFALK

SEQ ID NO: 12851 - protein, 6 aa, ARTIFICIAL SEQUENCE
  Synthetic Construct
GKFANK

SEQ ID NO: 12852 - protein, 6 aa, ARTIFICIAL SEQUENCE
  Synthetic Construct
GKFAQK

SEQ ID NO: 12853 - protein, 6 aa, ARTIFICIAL SEQUENCE
  Synthetic Construct
GKFARK

SEQ ID NO: 12854 - protein, 6 aa, ARTIFICIAL SEQUENCE
  Synthetic Construct
GKFASK

SEQ ID NO: 12855 - protein, 6 aa, ARTIFICIAL SEQUENCE
  Synthetic Construct
GKFATK

SEQ ID NO: 12856 - protein, 6 aa, ARTIFICIAL SEQUENCE
  Synthetic Construct
GKFAYK

SEQ ID NO: 12857 - protein, 6 aa, ARTIFICIAL SEQUENCE
  Synthetic Construct
GKFDAK

SEQ ID NO: 12858 - protein, 6 aa, ARTIFICIAL SEQUENCE
  Synthetic Construct
GKFDDK

SEQ ID NO: 12859 - protein, 6 aa, ARTIFICIAL SEQUENCE
  Synthetic Construct
GKFDEK

SEQ ID NO: 12860 - protein, 6 aa, ARTIFICIAL SEQUENCE
  Synthetic Construct
GKFDFK

SEQ ID NO: 12861 - protein, 6 aa, ARTIFICIAL SEQUENCE
  Synthetic Construct
GKFDGK

SEQ ID NO: 12862 - protein, 6 aa, ARTIFICIAL SEQUENCE
  Synthetic Construct
GKFDHK

SEQ ID NO: 12863 - protein, 6 aa, ARTIFICIAL SEQUENCE
  Synthetic Construct
GKFDIK

SEQ ID NO: 12864 - protein, 6 aa, ARTIFICIAL SEQUENCE
  Synthetic Construct
GKFDLK

SEQ ID NO: 12865 - protein, 6 aa, ARTIFICIAL SEQUENCE
  Synthetic Construct
GKFDNK

SEQ ID NO: 12866 - protein, 6 aa, ARTIFICIAL SEQUENCE
  Synthetic Construct
GKFDQK

SEQ ID NO: 12867 - protein, 6 aa, ARTIFICIAL SEQUENCE
  Synthetic Construct
GKFDRK

SEQ ID NO: 12868 - protein, 6 aa, ARTIFICIAL SEQUENCE
  Synthetic Construct
GKFDSK

SEQ ID NO: 12869 - protein, 6 aa, ARTIFICIAL SEQUENCE
  Synthetic Construct
GKFDTK

SEQ ID NO: 12870 - protein, 6 aa, ARTIFICIAL SEQUENCE
  Synthetic Construct
GKFDYK

SEQ ID NO: 12871 - protein, 6 aa, ARTIFICIAL SEQUENCE
  Synthetic Construct
GKFEAK

SEQ ID NO: 12872 - protein, 6 aa, ARTIFICIAL SEQUENCE
  Synthetic Construct
GKFEDK

SEQ ID NO: 12873 - protein, 6 aa, ARTIFICIAL SEQUENCE
  Synthetic Construct
GKFEEK

SEQ ID NO: 12874 - protein, 6 aa, ARTIFICIAL SEQUENCE
  Synthetic Construct
GKFEFK

SEQ ID NO: 12875 - protein, 6 aa, ARTIFICIAL SEQUENCE
  Synthetic Construct
GKFEGK

SEQ ID NO: 12876 - protein, 6 aa, ARTIFICIAL SEQUENCE
  Synthetic Construct
GKFEHK

SEQ ID NO: 12877 - protein, 6 aa, ARTIFICIAL SEQUENCE
  Synthetic Construct
GKFEIK

SEQ ID NO: 12878 - protein, 6 aa, ARTIFICIAL SEQUENCE
  Synthetic Construct
GKFELK

SEQ ID NO: 12879 - protein, 6 aa, ARTIFICIAL SEQUENCE
  Synthetic Construct
GKFENK

SEQ ID NO: 12880 - protein, 6 aa, ARTIFICIAL SEQUENCE
  Synthetic Construct
GKFEQK

SEQ ID NO: 12881 - protein, 6 aa, ARTIFICIAL SEQUENCE
  Synthetic Construct
GKFERK

SEQ ID NO: 12882 - protein, 6 aa, ARTIFICIAL SEQUENCE
  Synthetic Construct
GKFESK

SEQ ID NO: 12883 - protein, 6 aa, ARTIFICIAL SEQUENCE
  Synthetic Construct
GKFETK

SEQ ID NO: 12884 - protein, 6 aa, ARTIFICIAL SEQUENCE
  Synthetic Construct
GKFEYK

SEQ ID NO: 12885 - protein, 6 aa, ARTIFICIAL SEQUENCE
  Synthetic Construct
GKFFAK

SEQ ID NO: 12886 - protein, 6 aa, ARTIFICIAL SEQUENCE
  Synthetic Construct
GKFFDK

SEQ ID NO: 12887 - protein, 6 aa, ARTIFICIAL SEQUENCE
  Synthetic Construct
GKFFEK

SEQ ID NO: 12888 - protein, 6 aa, ARTIFICIAL SEQUENCE
  Synthetic Construct
GKFFFK

SEQ ID NO: 12889 - protein, 6 aa, ARTIFICIAL SEQUENCE
  Synthetic Construct
GKFFGK

SEQ ID NO: 12890 - protein, 6 aa, ARTIFICIAL SEQUENCE
  Synthetic Construct
GKFFHK

SEQ ID NO: 12891 - protein, 6 aa, ARTIFICIAL SEQUENCE
  Synthetic Construct
GKFFIK

SEQ ID NO: 12892 - protein, 6 aa, ARTIFICIAL SEQUENCE
  Synthetic Construct
GKFFLK

SEQ ID NO: 12893 - protein, 6 aa, ARTIFICIAL SEQUENCE
  Synthetic Construct
GKFFNK

SEQ ID NO: 12894 - protein, 6 aa, ARTIFICIAL SEQUENCE
  Synthetic Construct
GKFFQK

SEQ ID NO: 12895 - protein, 6 aa, ARTIFICIAL SEQUENCE
  Synthetic Construct
GKFFRK

SEQ ID NO: 12896 - protein, 6 aa, ARTIFICIAL SEQUENCE
  Synthetic Construct
GKFFSK

SEQ ID NO: 12897 - protein, 6 aa, ARTIFICIAL SEQUENCE
  Synthetic Construct
GKFFTK

SEQ ID NO: 12898 - protein, 6 aa, ARTIFICIAL SEQUENCE
  Synthetic Construct
GKFFYK

SEQ ID NO: 12899 - protein, 6 aa, ARTIFICIAL SEQUENCE
  Synthetic Construct
GKFGAK

SEQ ID NO: 12900 - protein, 6 aa, ARTIFICIAL SEQUENCE
  Synthetic Construct
GKFGDK

SEQ ID NO: 12901 - protein, 6 aa, ARTIFICIAL SEQUENCE
  Synthetic Construct
GKFGEK

SEQ ID NO: 12902 - protein, 6 aa, ARTIFICIAL SEQUENCE
  Synthetic Construct
GKFGFK

SEQ ID NO: 12903 - protein, 6 aa, ARTIFICIAL SEQUENCE
  Synthetic Construct
GKFGGK

SEQ ID NO: 12904 - protein, 6 aa, ARTIFICIAL SEQUENCE
  Synthetic Construct
GKFGHK

SEQ ID NO: 12905 - protein, 6 aa, ARTIFICIAL SEQUENCE
  Synthetic Construct
GKFGIK

SEQ ID NO: 12906 - protein, 6 aa, ARTIFICIAL SEQUENCE
  Synthetic Construct
GKFGLK

SEQ ID NO: 12907 - protein, 6 aa, ARTIFICIAL SEQUENCE
  Synthetic Construct
GKFGNK

SEQ ID NO: 12908 - protein, 6 aa, ARTIFICIAL SEQUENCE
  Synthetic Construct
GKFGQK

SEQ ID NO: 12909 - protein, 6 aa, ARTIFICIAL SEQUENCE
  Synthetic Construct
GKFGRK

SEQ ID NO: 12910 - protein, 6 aa, ARTIFICIAL SEQUENCE
  Synthetic Construct
GKFGSK

SEQ ID NO: 12911 - protein, 6 aa, ARTIFICIAL SEQUENCE
  Synthetic Construct
GKFGTK

SEQ ID NO: 12912 - protein, 6 aa, ARTIFICIAL SEQUENCE
  Synthetic Construct
GKFGYK

SEQ ID NO: 12913 - protein, 6 aa, ARTIFICIAL SEQUENCE
  Synthetic Construct
GKFHAK

SEQ ID NO: 12914 - protein, 6 aa, ARTIFICIAL SEQUENCE
  Synthetic Construct
GKFHDK

SEQ ID NO: 12915 - protein, 6 aa, ARTIFICIAL SEQUENCE
  Synthetic Construct
GKFHEK

SEQ ID NO: 12916 - protein, 6 aa, ARTIFICIAL SEQUENCE
  Synthetic Construct
GKFHFK

SEQ ID NO: 12917 - protein, 6 aa, ARTIFICIAL SEQUENCE
  Synthetic Construct
GKFHGK

SEQ ID NO: 12918 - protein, 6 aa, ARTIFICIAL SEQUENCE
  Synthetic Construct
GKFHHK

SEQ ID NO: 12919 - protein, 6 aa, ARTIFICIAL SEQUENCE
  Synthetic Construct
GKFHIK

SEQ ID NO: 12920 - protein, 6 aa, ARTIFICIAL SEQUENCE
  Synthetic Construct
GKFHLK

SEQ ID NO: 12921 - protein, 6 aa, ARTIFICIAL SEQUENCE
  Synthetic Construct
GKFHNK

SEQ ID NO: 12922 - protein, 6 aa, ARTIFICIAL SEQUENCE
  Synthetic Construct
GKFHQK

SEQ ID NO: 12923 - protein, 6 aa, ARTIFICIAL SEQUENCE
  Synthetic Construct
GKFHRK

SEQ ID NO: 12924 - protein, 6 aa, ARTIFICIAL SEQUENCE
  Synthetic Construct
GKFHSK

SEQ ID NO: 12925 - protein, 6 aa, ARTIFICIAL SEQUENCE
  Synthetic Construct
GKFHTK

SEQ ID NO: 12926 - protein, 6 aa, ARTIFICIAL SEQUENCE
  Synthetic Construct
GKFHYK

SEQ ID NO: 12927 - protein, 6 aa, ARTIFICIAL SEQUENCE
  Synthetic Construct
GKFIAK

SEQ ID NO: 12928 - protein, 6 aa, ARTIFICIAL SEQUENCE
  Synthetic Construct
GKFIDK

SEQ ID NO: 12929 - protein, 6 aa, ARTIFICIAL SEQUENCE
  Synthetic Construct
GKFIEK

SEQ ID NO: 12930 - protein, 6 aa, ARTIFICIAL SEQUENCE
  Synthetic Construct
GKFIFK

SEQ ID NO: 12931 - protein, 6 aa, ARTIFICIAL SEQUENCE
  Synthetic Construct
GKFIGK

SEQ ID NO: 12932 - protein, 6 aa, ARTIFICIAL SEQUENCE
  Synthetic Construct
GKFIHK

SEQ ID NO: 12933 - protein, 6 aa, ARTIFICIAL SEQUENCE
  Synthetic Construct
GKFIIK

SEQ ID NO: 12934 - protein, 6 aa, ARTIFICIAL SEQUENCE
  Synthetic Construct
GKFILK

SEQ ID NO: 12935 - protein, 6 aa, ARTIFICIAL SEQUENCE
  Synthetic Construct
GKFINK

SEQ ID NO: 12936 - protein, 6 aa, ARTIFICIAL SEQUENCE
  Synthetic Construct
GKFIQK

SEQ ID NO: 12937 - protein, 6 aa, ARTIFICIAL SEQUENCE
  Synthetic Construct
GKFIRK

SEQ ID NO: 12938 - protein, 6 aa, ARTIFICIAL SEQUENCE
  Synthetic Construct
GKFISK

SEQ ID NO: 12939 - protein, 6 aa, ARTIFICIAL SEQUENCE
  Synthetic Construct
GKFITK

SEQ ID NO: 12940 - protein, 6 aa, ARTIFICIAL SEQUENCE
  Synthetic Construct
GKFIYK

SEQ ID NO: 12941 - protein, 6 aa, ARTIFICIAL SEQUENCE
  Synthetic Construct
GKFLAK

SEQ ID NO: 12942 - protein, 6 aa, ARTIFICIAL SEQUENCE
  Synthetic Construct
GKFLDK

SEQ ID NO: 12943 - protein, 6 aa, ARTIFICIAL SEQUENCE
  Synthetic Construct
GKFLEK

SEQ ID NO: 12944 - protein, 6 aa, ARTIFICIAL SEQUENCE
  Synthetic Construct
GKFLFK

SEQ ID NO: 12945 - protein, 6 aa, ARTIFICIAL SEQUENCE
  Synthetic Construct
GKFLGK

SEQ ID NO: 12946 - protein, 6 aa, ARTIFICIAL SEQUENCE
  Synthetic Construct
GKFLHK

SEQ ID NO: 12947 - protein, 6 aa, ARTIFICIAL SEQUENCE
  Synthetic Construct
GKFLIK

SEQ ID NO: 12948 - protein, 6 aa, ARTIFICIAL SEQUENCE
  Synthetic Construct
GKFLLK

SEQ ID NO: 12949 - protein, 6 aa, ARTIFICIAL SEQUENCE
  Synthetic Construct
GKFLNK

SEQ ID NO: 12950 - protein, 6 aa, ARTIFICIAL SEQUENCE
  Synthetic Construct
GKFLQK

SEQ ID NO: 12951 - protein, 6 aa, ARTIFICIAL SEQUENCE
  Synthetic Construct
GKFLRK

SEQ ID NO: 12952 - protein, 6 aa, ARTIFICIAL SEQUENCE
  Synthetic Construct
GKFLSK

SEQ ID NO: 12953 - protein, 6 aa, ARTIFICIAL SEQUENCE
  Synthetic Construct
GKFLTK

SEQ ID NO: 12954 - protein, 6 aa, ARTIFICIAL SEQUENCE
  Synthetic Construct
GKFLYK

SEQ ID NO: 12955 - protein, 6 aa, ARTIFICIAL SEQUENCE
  Synthetic Construct
GKFNAK

SEQ ID NO: 12956 - protein, 6 aa, ARTIFICIAL SEQUENCE
  Synthetic Construct
GKFNDK

SEQ ID NO: 12957 - protein, 6 aa, ARTIFICIAL SEQUENCE
  Synthetic Construct
GKFNEK

SEQ ID NO: 12958 - protein, 6 aa, ARTIFICIAL SEQUENCE
  Synthetic Construct
GKFNFK

SEQ ID NO: 12959 - protein, 6 aa, ARTIFICIAL SEQUENCE
  Synthetic Construct
GKFNGK

SEQ ID NO: 12960 - protein, 6 aa, ARTIFICIAL SEQUENCE
  Synthetic Construct
GKFNHK

SEQ ID NO: 12961 - protein, 6 aa, ARTIFICIAL SEQUENCE
  Synthetic Construct
GKFNIK

SEQ ID NO: 12962 - protein, 6 aa, ARTIFICIAL SEQUENCE
  Synthetic Construct
GKFNLK

SEQ ID NO: 12963 - protein, 6 aa, ARTIFICIAL SEQUENCE
  Synthetic Construct
GKFNNK

SEQ ID NO: 12964 - protein, 6 aa, ARTIFICIAL SEQUENCE
  Synthetic Construct
GKFNQK

SEQ ID NO: 12965 - protein, 6 aa, ARTIFICIAL SEQUENCE
  Synthetic Construct
GKFNRK

SEQ ID NO: 12966 - protein, 6 aa, ARTIFICIAL SEQUENCE
  Synthetic Construct
GKFNSK

SEQ ID NO: 12967 - protein, 6 aa, ARTIFICIAL SEQUENCE
  Synthetic Construct
GKFNTK

SEQ ID NO: 12968 - protein, 6 aa, ARTIFICIAL SEQUENCE
  Synthetic Construct
GKFNYK

SEQ ID NO: 12969 - protein, 6 aa, ARTIFICIAL SEQUENCE
  Synthetic Construct
GKFQAK

SEQ ID NO: 12970 - protein, 6 aa, ARTIFICIAL SEQUENCE
  Synthetic Construct
GKFQDK

SEQ ID NO: 12971 - protein, 6 aa, ARTIFICIAL SEQUENCE
  Synthetic Construct
GKFQEK

SEQ ID NO: 12972 - protein, 6 aa, ARTIFICIAL SEQUENCE
  Synthetic Construct
GKFQFK

SEQ ID NO: 12973 - protein, 6 aa, ARTIFICIAL SEQUENCE
  Synthetic Construct
GKFQGK

SEQ ID NO: 12974 - protein, 6 aa, ARTIFICIAL SEQUENCE
  Synthetic Construct
GKFQHK

SEQ ID NO: 12975 - protein, 6 aa, ARTIFICIAL SEQUENCE
  Synthetic Construct
GKFQIK

SEQ ID NO: 12976 - protein, 6 aa, ARTIFICIAL SEQUENCE
  Synthetic Construct
GKFQLK

SEQ ID NO: 12977 - protein, 6 aa, ARTIFICIAL SEQUENCE
  Synthetic Construct
GKFQNK

SEQ ID NO: 12978 - protein, 6 aa, ARTIFICIAL SEQUENCE
  Synthetic Construct
GKFQQK

SEQ ID NO: 12979 - protein, 6 aa, ARTIFICIAL SEQUENCE
  Synthetic Construct
GKFQRK

SEQ ID NO: 12980 - protein, 6 aa, ARTIFICIAL SEQUENCE
  Synthetic Construct
GKFQSK

SEQ ID NO: 12981 - protein, 6 aa, ARTIFICIAL SEQUENCE
  Synthetic Construct
GKFQTK

SEQ ID NO: 12982 - protein, 6 aa, ARTIFICIAL SEQUENCE
  Synthetic Construct
GKFQYK

SEQ ID NO: 12983 - protein, 6 aa, ARTIFICIAL SEQUENCE
  Synthetic Construct
GKFRAK

SEQ ID NO: 12984 - protein, 6 aa, ARTIFICIAL SEQUENCE
  Synthetic Construct
GKFRDK

SEQ ID NO: 12985 - protein, 6 aa, ARTIFICIAL SEQUENCE
  Synthetic Construct
GKFREK

SEQ ID NO: 12986 - protein, 6 aa, ARTIFICIAL SEQUENCE
  Synthetic Construct
GKFRFK

SEQ ID NO: 12987 - protein, 6 aa, ARTIFICIAL SEQUENCE
  Synthetic Construct
GKFRGK

SEQ ID NO: 12988 - protein, 6 aa, ARTIFICIAL SEQUENCE
  Synthetic Construct
GKFRHK

SEQ ID NO: 12989 - protein, 6 aa, ARTIFICIAL SEQUENCE
  Synthetic Construct
GKFRIK

SEQ ID NO: 12990 - protein, 6 aa, ARTIFICIAL SEQUENCE
  Synthetic Construct
GKFRLK

SEQ ID NO: 12991 - protein, 6 aa, ARTIFICIAL SEQUENCE
  Synthetic Construct
GKFRNK

SEQ ID NO: 12992 - protein, 6 aa, ARTIFICIAL SEQUENCE
  Synthetic Construct
GKFRQK

SEQ ID NO: 12993 - protein, 6 aa, ARTIFICIAL SEQUENCE
  Synthetic Construct
GKFRRK

SEQ ID NO: 12994 - protein, 6 aa, ARTIFICIAL SEQUENCE
  Synthetic Construct
GKFRSK

SEQ ID NO: 12995 - protein, 6 aa, ARTIFICIAL SEQUENCE
  Synthetic Construct
GKFRTK

SEQ ID NO: 12996 - protein, 6 aa, ARTIFICIAL SEQUENCE
  Synthetic Construct
GKFRYK

SEQ ID NO: 12997 - protein, 6 aa, ARTIFICIAL SEQUENCE
  Synthetic Construct
GKFSAK

SEQ ID NO: 12998 - protein, 6 aa, ARTIFICIAL SEQUENCE
  Synthetic Construct
GKFSDK

SEQ ID NO: 12999 - protein, 6 aa, ARTIFICIAL SEQUENCE
  Synthetic Construct
GKFSEK

SEQ ID NO: 13000 - protein, 6 aa, ARTIFICIAL SEQUENCE
  Synthetic Construct
GKFSFK

SEQ ID NO: 13001 - protein, 6 aa, ARTIFICIAL SEQUENCE
  Synthetic Construct
GKFSGK

SEQ ID NO: 13002 - protein, 6 aa, ARTIFICIAL SEQUENCE
  Synthetic Construct
GKFSHK

SEQ ID NO: 13003 - protein, 6 aa, ARTIFICIAL SEQUENCE
  Synthetic Construct
GKFSIK

SEQ ID NO: 13004 - protein, 6 aa, ARTIFICIAL SEQUENCE
  Synthetic Construct
GKFSLK

SEQ ID NO: 13005 - protein, 6 aa, ARTIFICIAL SEQUENCE
  Synthetic Construct
GKFSNK

SEQ ID NO: 13006 - protein, 6 aa, ARTIFICIAL SEQUENCE
  Synthetic Construct
GKFSQK

SEQ ID NO: 13007 - protein, 6 aa, ARTIFICIAL SEQUENCE
  Synthetic Construct
GKFSRK

SEQ ID NO: 13008 - protein, 6 aa, ARTIFICIAL SEQUENCE
  Synthetic Construct
GKFSSK

SEQ ID NO: 13009 - protein, 6 aa, ARTIFICIAL SEQUENCE
  Synthetic Construct
GKFSTK

SEQ ID NO: 13010 - protein, 6 aa, ARTIFICIAL SEQUENCE
  Synthetic Construct
GKFSYK

SEQ ID NO: 13011 - protein, 6 aa, ARTIFICIAL SEQUENCE
  Synthetic Construct
GKFTAK

SEQ ID NO: 13012 - protein, 6 aa, ARTIFICIAL SEQUENCE
  Synthetic Construct
GKFTDK

SEQ ID NO: 13013 - protein, 6 aa, ARTIFICIAL SEQUENCE
  Synthetic Construct
GKFTEK

SEQ ID NO: 13014 - protein, 6 aa, ARTIFICIAL SEQUENCE
  Synthetic Construct
GKFTFK

SEQ ID NO: 13015 - protein, 6 aa, ARTIFICIAL SEQUENCE
  Synthetic Construct
GKFTGK

SEQ ID NO: 13016 - protein, 6 aa, ARTIFICIAL SEQUENCE
  Synthetic Construct
GKFTHK

SEQ ID NO: 13017 - protein, 6 aa, ARTIFICIAL SEQUENCE
  Synthetic Construct
GKFTIK

SEQ ID NO: 13018 - protein, 6 aa, ARTIFICIAL SEQUENCE
  Synthetic Construct
GKFTLK

SEQ ID NO: 13019 - protein, 6 aa, ARTIFICIAL SEQUENCE
  Synthetic Construct
GKFTNK

SEQ ID NO: 13020 - protein, 6 aa, ARTIFICIAL SEQUENCE
  Synthetic Construct
GKFTQK

SEQ ID NO: 13021 - protein, 6 aa, ARTIFICIAL SEQUENCE
  Synthetic Construct
GKFTRK

SEQ ID NO: 13022 - protein, 6 aa, ARTIFICIAL SEQUENCE
  Synthetic Construct
GKFTSK

SEQ ID NO: 13023 - protein, 6 aa, ARTIFICIAL SEQUENCE
  Synthetic Construct
GKFTTK

SEQ ID NO: 13024 - protein, 6 aa, ARTIFICIAL SEQUENCE
  Synthetic Construct
GKFTYK

SEQ ID NO: 13025 - protein, 6 aa, ARTIFICIAL SEQUENCE
  Synthetic Construct
GKFYAK

SEQ ID NO: 13026 - protein, 6 aa, ARTIFICIAL SEQUENCE
  Synthetic Construct
GKFYDK

SEQ ID NO: 13027 - protein, 6 aa, ARTIFICIAL SEQUENCE
  Synthetic Construct
GKFYEK

SEQ ID NO: 13028 - protein, 6 aa, ARTIFICIAL SEQUENCE
  Synthetic Construct
GKFYFK

SEQ ID NO: 13029 - protein, 6 aa, ARTIFICIAL SEQUENCE
  Synthetic Construct
GKFYGK

SEQ ID NO: 13030 - protein, 6 aa, ARTIFICIAL SEQUENCE
  Synthetic Construct
GKFYHK

SEQ ID NO: 13031 - protein, 6 aa, ARTIFICIAL SEQUENCE
  Synthetic Construct
GKFYIK

SEQ ID NO: 13032 - protein, 6 aa, ARTIFICIAL SEQUENCE
  Synthetic Construct
GKFYLK

SEQ ID NO: 13033 - protein, 6 aa, ARTIFICIAL SEQUENCE
  Synthetic Construct
GKFYNK

SEQ ID NO: 13034 - protein, 6 aa, ARTIFICIAL SEQUENCE
  Synthetic Construct
GKFYQK

SEQ ID NO: 13035 - protein, 6 aa, ARTIFICIAL SEQUENCE
  Synthetic Construct
GKFYRK

SEQ ID NO: 13036 - protein, 6 aa, ARTIFICIAL SEQUENCE
  Synthetic Construct
GKFYSK

SEQ ID NO: 13037 - protein, 6 aa, ARTIFICIAL SEQUENCE
  Synthetic Construct
GKFYTK

SEQ ID NO: 13038 - protein, 6 aa, ARTIFICIAL SEQUENCE
  Synthetic Construct
GKFYYK

SEQ ID NO: 13039 - protein, 6 aa, ARTIFICIAL SEQUENCE
  Synthetic Construct
GKGAAK

SEQ ID NO: 13040 - protein, 6 aa, ARTIFICIAL SEQUENCE
  Synthetic Construct
GKGADK

SEQ ID NO: 13041 - protein, 6 aa, ARTIFICIAL SEQUENCE
  Synthetic Construct
GKGAEK

SEQ ID NO: 13042 - protein, 6 aa, ARTIFICIAL SEQUENCE
  Synthetic Construct
GKGAFK

SEQ ID NO: 13043 - protein, 6 aa, ARTIFICIAL SEQUENCE
  Synthetic Construct
GKGAGK

SEQ ID NO: 13044 - protein, 6 aa, ARTIFICIAL SEQUENCE
  Synthetic Construct
GKGAHK

SEQ ID NO: 13045 - protein, 6 aa, ARTIFICIAL SEQUENCE
  Synthetic Construct
GKGAIK

SEQ ID NO: 13046 - protein, 6 aa, ARTIFICIAL SEQUENCE
  Synthetic Construct
GKGALK

SEQ ID NO: 13047 - protein, 6 aa, ARTIFICIAL SEQUENCE
  Synthetic Construct
GKGANK

SEQ ID NO: 13048 - protein, 6 aa, ARTIFICIAL SEQUENCE
  Synthetic Construct
GKGAQK

SEQ ID NO: 13049 - protein, 6 aa, ARTIFICIAL SEQUENCE
  Synthetic Construct
GKGARK

SEQ ID NO: 13050 - protein, 6 aa, ARTIFICIAL SEQUENCE
  Synthetic Construct
GKGASK

SEQ ID NO: 13051 - protein, 6 aa, ARTIFICIAL SEQUENCE
  Synthetic Construct
GKGATK

SEQ ID NO: 13052 - protein, 6 aa, ARTIFICIAL SEQUENCE
  Synthetic Construct
GKGAYK

SEQ ID NO: 13053 - protein, 6 aa, ARTIFICIAL SEQUENCE
  Synthetic Construct
GKGDAK

SEQ ID NO: 13054 - protein, 6 aa, ARTIFICIAL SEQUENCE
  Synthetic Construct
GKGDDK

SEQ ID NO: 13055 - protein, 6 aa, ARTIFICIAL SEQUENCE
  Synthetic Construct
GKGDEK

SEQ ID NO: 13056 - protein, 6 aa, ARTIFICIAL SEQUENCE
  Synthetic Construct
GKGDFK

SEQ ID NO: 13057 - protein, 6 aa, ARTIFICIAL SEQUENCE
  Synthetic Construct
GKGDGK

SEQ ID NO: 13058 - protein, 6 aa, ARTIFICIAL SEQUENCE
  Synthetic Construct
GKGDHK

SEQ ID NO: 13059 - protein, 6 aa, ARTIFICIAL SEQUENCE
  Synthetic Construct
GKGDIK

SEQ ID NO: 13060 - protein, 6 aa, ARTIFICIAL SEQUENCE
  Synthetic Construct
GKGDLK

SEQ ID NO: 13061 - protein, 6 aa, ARTIFICIAL SEQUENCE
  Synthetic Construct
GKGDNK

SEQ ID NO: 13062 - protein, 6 aa, ARTIFICIAL SEQUENCE
  Synthetic Construct
GKGDQK

SEQ ID NO: 13063 - protein, 6 aa, ARTIFICIAL SEQUENCE
  Synthetic Construct
GKGDRK

SEQ ID NO: 13064 - protein, 6 aa, ARTIFICIAL SEQUENCE
  Synthetic Construct
GKGDSK

SEQ ID NO: 13065 - protein, 6 aa, ARTIFICIAL SEQUENCE
  Synthetic Construct
GKGDTK

SEQ ID NO: 13066 - protein, 6 aa, ARTIFICIAL SEQUENCE
  Synthetic Construct
GKGDYK

SEQ ID NO: 13067 - protein, 6 aa, ARTIFICIAL SEQUENCE
  Synthetic Construct
GKGEAK

SEQ ID NO: 13068 - protein, 6 aa, ARTIFICIAL SEQUENCE
  Synthetic Construct
GKGEDK

SEQ ID NO: 13069 - protein, 6 aa, ARTIFICIAL SEQUENCE
  Synthetic Construct
GKGEEK

SEQ ID NO: 13070 - protein, 6 aa, ARTIFICIAL SEQUENCE
  Synthetic Construct
GKGEFK

SEQ ID NO: 13071 - protein, 6 aa, ARTIFICIAL SEQUENCE
  Synthetic Construct
GKGEGK

SEQ ID NO: 13072 - protein, 6 aa, ARTIFICIAL SEQUENCE
  Synthetic Construct
GKGEHK

SEQ ID NO: 13073 - protein, 6 aa, ARTIFICIAL SEQUENCE
  Synthetic Construct
GKGEIK

SEQ ID NO: 13074 - protein, 6 aa, ARTIFICIAL SEQUENCE
  Synthetic Construct
GKGELK

SEQ ID NO: 13075 - protein, 6 aa, ARTIFICIAL SEQUENCE
  Synthetic Construct
GKGENK

SEQ ID NO: 13076 - protein, 6 aa, ARTIFICIAL SEQUENCE
  Synthetic Construct
GKGEQK

SEQ ID NO: 13077 - protein, 6 aa, ARTIFICIAL SEQUENCE
  Synthetic Construct
GKGERK

SEQ ID NO: 13078 - protein, 6 aa, ARTIFICIAL SEQUENCE
  Synthetic Construct
GKGESK

SEQ ID NO: 13079 - protein, 6 aa, ARTIFICIAL SEQUENCE
  Synthetic Construct
GKGETK

SEQ ID NO: 13080 - protein, 6 aa, ARTIFICIAL SEQUENCE
  Synthetic Construct
GKGEYK

SEQ ID NO: 13081 - protein, 6 aa, ARTIFICIAL SEQUENCE
  Synthetic Construct
GKGFAK

SEQ ID NO: 13082 - protein, 6 aa, ARTIFICIAL SEQUENCE
  Synthetic Construct
GKGFDK

SEQ ID NO: 13083 - protein, 6 aa, ARTIFICIAL SEQUENCE
  Synthetic Construct
GKGFEK

SEQ ID NO: 13084 - protein, 6 aa, ARTIFICIAL SEQUENCE
  Synthetic Construct
GKGFFK

SEQ ID NO: 13085 - protein, 6 aa, ARTIFICIAL SEQUENCE
  Synthetic Construct
GKGFGK

SEQ ID NO: 13086 - protein, 6 aa, ARTIFICIAL SEQUENCE
  Synthetic Construct
GKGFHK

SEQ ID NO: 13087 - protein, 6 aa, ARTIFICIAL SEQUENCE
  Synthetic Construct
GKGFIK

SEQ ID NO: 13088 - protein, 6 aa, ARTIFICIAL SEQUENCE
  Synthetic Construct
GKGFLK

SEQ ID NO: 13089 - protein, 6 aa, ARTIFICIAL SEQUENCE
  Synthetic Construct
GKGFNK

SEQ ID NO: 13090 - protein, 6 aa, ARTIFICIAL SEQUENCE
  Synthetic Construct
GKGFQK

SEQ ID NO: 13091 - protein, 6 aa, ARTIFICIAL SEQUENCE
  Synthetic Construct
GKGFRK

SEQ ID NO: 13092 - protein, 6 aa, ARTIFICIAL SEQUENCE
  Synthetic Construct
GKGFSK

SEQ ID NO: 13093 - protein, 6 aa, ARTIFICIAL SEQUENCE
  Synthetic Construct
GKGFTK

SEQ ID NO: 13094 - protein, 6 aa, ARTIFICIAL SEQUENCE
  Synthetic Construct
GKGFYK

SEQ ID NO: 13095 - protein, 6 aa, ARTIFICIAL SEQUENCE
  Synthetic Construct
GKGGAK

SEQ ID NO: 13096 - protein, 6 aa, ARTIFICIAL SEQUENCE
  Synthetic Construct
GKGGDK

SEQ ID NO: 13097 - protein, 6 aa, ARTIFICIAL SEQUENCE
  Synthetic Construct
GKGGEK

SEQ ID NO: 13098 - protein, 6 aa, ARTIFICIAL SEQUENCE
  Synthetic Construct
GKGGFK

SEQ ID NO: 13099 - protein, 6 aa, ARTIFICIAL SEQUENCE
  Synthetic Construct
GKGGGK

SEQ ID NO: 13100 - protein, 6 aa, ARTIFICIAL SEQUENCE
  Synthetic Construct
GKGGHK

SEQ ID NO: 13101 - protein, 6 aa, ARTIFICIAL SEQUENCE
  Synthetic Construct
GKGGIK

SEQ ID NO: 13102 - protein, 6 aa, ARTIFICIAL SEQUENCE
  Synthetic Construct
GKGGLK

SEQ ID NO: 13103 - protein, 6 aa, ARTIFICIAL SEQUENCE
  Synthetic Construct
GKGGNK

SEQ ID NO: 13104 - protein, 6 aa, ARTIFICIAL SEQUENCE
  Synthetic Construct
GKGGQK

SEQ ID NO: 13105 - protein, 6 aa, ARTIFICIAL SEQUENCE
  Synthetic Construct
GKGGRK

SEQ ID NO: 13106 - protein, 6 aa, ARTIFICIAL SEQUENCE
  Synthetic Construct
GKGGSK

SEQ ID NO: 13107 - protein, 6 aa, ARTIFICIAL SEQUENCE
  Synthetic Construct
GKGGTK

SEQ ID NO: 13108 - protein, 6 aa, ARTIFICIAL SEQUENCE
  Synthetic Construct
GKGGYK

SEQ ID NO: 13109 - protein, 6 aa, ARTIFICIAL SEQUENCE
  Synthetic Construct
GKGHAK

SEQ ID NO: 13110 - protein, 6 aa, ARTIFICIAL SEQUENCE
  Synthetic Construct
GKGHDK

SEQ ID NO: 13111 - protein, 6 aa, ARTIFICIAL SEQUENCE
  Synthetic Construct
GKGHEK

SEQ ID NO: 13112 - protein, 6 aa, ARTIFICIAL SEQUENCE
  Synthetic Construct
GKGHFK

SEQ ID NO: 13113 - protein, 6 aa, ARTIFICIAL SEQUENCE
  Synthetic Construct
GKGHGK

SEQ ID NO: 13114 - protein, 6 aa, ARTIFICIAL SEQUENCE
  Synthetic Construct
GKGHHK

SEQ ID NO: 13115 - protein, 6 aa, ARTIFICIAL SEQUENCE
  Synthetic Construct
GKGHIK

SEQ ID NO: 13116 - protein, 6 aa, ARTIFICIAL SEQUENCE
  Synthetic Construct
GKGHLK

SEQ ID NO: 13117 - protein, 6 aa, ARTIFICIAL SEQUENCE
  Synthetic Construct
GKGHNK

SEQ ID NO: 13118 - protein, 6 aa, ARTIFICIAL SEQUENCE
  Synthetic Construct
GKGHQK

SEQ ID NO: 13119 - protein, 6 aa, ARTIFICIAL SEQUENCE
  Synthetic Construct
GKGHRK

SEQ ID NO: 13120 - protein, 6 aa, ARTIFICIAL SEQUENCE
  Synthetic Construct
GKGHSK

SEQ ID NO: 13121 - protein, 6 aa, ARTIFICIAL SEQUENCE
  Synthetic Construct
GKGHTK

SEQ ID NO: 13122 - protein, 6 aa, ARTIFICIAL SEQUENCE
  Synthetic Construct
GKGHYK

SEQ ID NO: 13123 - protein, 6 aa, ARTIFICIAL SEQUENCE
  Synthetic Construct
GKGIAK

SEQ ID NO: 13124 - protein, 6 aa, ARTIFICIAL SEQUENCE
  Synthetic Construct
GKGIDK

SEQ ID NO: 13125 - protein, 6 aa, ARTIFICIAL SEQUENCE
  Synthetic Construct
GKGIEK

SEQ ID NO: 13126 - protein, 6 aa, ARTIFICIAL SEQUENCE
  Synthetic Construct
GKGIFK

SEQ ID NO: 13127 - protein, 6 aa, ARTIFICIAL SEQUENCE
  Synthetic Construct
GKGIGK

SEQ ID NO: 13128 - protein, 6 aa, ARTIFICIAL SEQUENCE
  Synthetic Construct
GKGIHK

SEQ ID NO: 13129 - protein, 6 aa, ARTIFICIAL SEQUENCE
  Synthetic Construct
GKGIIK

SEQ ID NO: 13130 - protein, 6 aa, ARTIFICIAL SEQUENCE
  Synthetic Construct
GKGILK

SEQ ID NO: 13131 - protein, 6 aa, ARTIFICIAL SEQUENCE
  Synthetic Construct
GKGINK

SEQ ID NO: 13132 - protein, 6 aa, ARTIFICIAL SEQUENCE
  Synthetic Construct
GKGIQK

SEQ ID NO: 13133 - protein, 6 aa, ARTIFICIAL SEQUENCE
  Synthetic Construct
GKGIRK

SEQ ID NO: 13134 - protein, 6 aa, ARTIFICIAL SEQUENCE
  Synthetic Construct
GKGISK

SEQ ID NO: 13135 - protein, 6 aa, ARTIFICIAL SEQUENCE
  Synthetic Construct
GKGITK

SEQ ID NO: 13136 - protein, 6 aa, ARTIFICIAL SEQUENCE
  Synthetic Construct
GKGIYK

SEQ ID NO: 13137 - protein, 6 aa, ARTIFICIAL SEQUENCE
  Synthetic Construct
GKGLAK

SEQ ID NO: 13138 - protein, 6 aa, ARTIFICIAL SEQUENCE
  Synthetic Construct
GKGLDK

SEQ ID NO: 13139 - protein, 6 aa, ARTIFICIAL SEQUENCE
  Synthetic Construct
GKGLEK

SEQ ID NO: 13140 - protein, 6 aa, ARTIFICIAL SEQUENCE
  Synthetic Construct
GKGLFK

SEQ ID NO: 13141 - protein, 6 aa, ARTIFICIAL SEQUENCE
  Synthetic Construct
GKGLGK

SEQ ID NO: 13142 - protein, 6 aa, ARTIFICIAL SEQUENCE
  Synthetic Construct
GKGLHK

SEQ ID NO: 13143 - protein, 6 aa, ARTIFICIAL SEQUENCE
  Synthetic Construct
GKGLIK

SEQ ID NO: 13144 - protein, 6 aa, ARTIFICIAL SEQUENCE
  Synthetic Construct
GKGLLK

SEQ ID NO: 13145 - protein, 6 aa, ARTIFICIAL SEQUENCE
  Synthetic Construct
GKGLNK

SEQ ID NO: 13146 - protein, 6 aa, ARTIFICIAL SEQUENCE
  Synthetic Construct
GKGLQK

SEQ ID NO: 13147 - protein, 6 aa, ARTIFICIAL SEQUENCE
  Synthetic Construct
GKGLRK

SEQ ID NO: 13148 - protein, 6 aa, ARTIFICIAL SEQUENCE
  Synthetic Construct
GKGLSK

SEQ ID NO: 13149 - protein, 6 aa, ARTIFICIAL SEQUENCE
  Synthetic Construct
GKGLTK

SEQ ID NO: 13150 - protein, 6 aa, ARTIFICIAL SEQUENCE
  Synthetic Construct
GKGLYK

SEQ ID NO: 13151 - protein, 6 aa, ARTIFICIAL SEQUENCE
  Synthetic Construct
GKGNAK

SEQ ID NO: 13152 - protein, 6 aa, ARTIFICIAL SEQUENCE
  Synthetic Construct
GKGNDK

SEQ ID NO: 13153 - protein, 6 aa, ARTIFICIAL SEQUENCE
  Synthetic Construct
GKGNEK

SEQ ID NO: 13154 - protein, 6 aa, ARTIFICIAL SEQUENCE
  Synthetic Construct
GKGNFK

SEQ ID NO: 13155 - protein, 6 aa, ARTIFICIAL SEQUENCE
  Synthetic Construct
GKGNGK

SEQ ID NO: 13156 - protein, 6 aa, ARTIFICIAL SEQUENCE
  Synthetic Construct
GKGNHK

SEQ ID NO: 13157 - protein, 6 aa, ARTIFICIAL SEQUENCE
  Synthetic Construct
GKGNIK

SEQ ID NO: 13158 - protein, 6 aa, ARTIFICIAL SEQUENCE
  Synthetic Construct
GKGNLK

SEQ ID NO: 13159 - protein, 6 aa, ARTIFICIAL SEQUENCE
  Synthetic Construct
GKGNNK

SEQ ID NO: 13160 - protein, 6 aa, ARTIFICIAL SEQUENCE
  Synthetic Construct
GKGNQK

SEQ ID NO: 13161 - protein, 6 aa, ARTIFICIAL SEQUENCE
  Synthetic Construct
GKGNRK

SEQ ID NO: 13162 - protein, 6 aa, ARTIFICIAL SEQUENCE
  Synthetic Construct
GKGNSK

SEQ ID NO: 13163 - protein, 6 aa, ARTIFICIAL SEQUENCE
  Synthetic Construct
GKGNTK

SEQ ID NO: 13164 - protein, 6 aa, ARTIFICIAL SEQUENCE
  Synthetic Construct
GKGNYK

SEQ ID NO: 13165 - protein, 6 aa, ARTIFICIAL SEQUENCE
  Synthetic Construct
GKGQAK

SEQ ID NO: 13166 - protein, 6 aa, ARTIFICIAL SEQUENCE
  Synthetic Construct
GKGQDK

SEQ ID NO: 13167 - protein, 6 aa, ARTIFICIAL SEQUENCE
  Synthetic Construct
GKGQEK

SEQ ID NO: 13168 - protein, 6 aa, ARTIFICIAL SEQUENCE
  Synthetic Construct
GKGQFK

SEQ ID NO: 13169 - protein, 6 aa, ARTIFICIAL SEQUENCE
  Synthetic Construct
GKGQGK

SEQ ID NO: 13170 - protein, 6 aa, ARTIFICIAL SEQUENCE
  Synthetic Construct
GKGQHK

SEQ ID NO: 13171 - protein, 6 aa, ARTIFICIAL SEQUENCE
  Synthetic Construct
GKGQIK

SEQ ID NO: 13172 - protein, 6 aa, ARTIFICIAL SEQUENCE
  Synthetic Construct
GKGQLK

SEQ ID NO: 13173 - protein, 6 aa, ARTIFICIAL SEQUENCE
  Synthetic Construct
GKGQNK

SEQ ID NO: 13174 - protein, 6 aa, ARTIFICIAL SEQUENCE
  Synthetic Construct
GKGQQK

SEQ ID NO: 13175 - protein, 6 aa, ARTIFICIAL SEQUENCE
  Synthetic Construct
GKGQRK

SEQ ID NO: 13176 - protein, 6 aa, ARTIFICIAL SEQUENCE
  Synthetic Construct
GKGQSK

SEQ ID NO: 13177 - protein, 6 aa, ARTIFICIAL SEQUENCE
  Synthetic Construct
GKGQTK

SEQ ID NO: 13178 - protein, 6 aa, ARTIFICIAL SEQUENCE
  Synthetic Construct
GKGQYK

SEQ ID NO: 13179 - protein, 6 aa, ARTIFICIAL SEQUENCE
  Synthetic Construct
GKGRAK

SEQ ID NO: 13180 - protein, 6 aa, ARTIFICIAL SEQUENCE
  Synthetic Construct
GKGRDK

SEQ ID NO: 13181 - protein, 6 aa, ARTIFICIAL SEQUENCE
  Synthetic Construct
GKGREK

SEQ ID NO: 13182 - protein, 6 aa, ARTIFICIAL SEQUENCE
  Synthetic Construct
GKGRFK

SEQ ID NO: 13183 - protein, 6 aa, ARTIFICIAL SEQUENCE
  Synthetic Construct
GKGRGK

SEQ ID NO: 13184 - protein, 6 aa, ARTIFICIAL SEQUENCE
  Synthetic Construct
GKGRHK

SEQ ID NO: 13185 - protein, 6 aa, ARTIFICIAL SEQUENCE
  Synthetic Construct
GKGRIK

SEQ ID NO: 13186 - protein, 6 aa, ARTIFICIAL SEQUENCE
  Synthetic Construct
GKGRLK

SEQ ID NO: 13187 - protein, 6 aa, ARTIFICIAL SEQUENCE
  Synthetic Construct
GKGRNK

SEQ ID NO: 13188 - protein, 6 aa, ARTIFICIAL SEQUENCE
  Synthetic Construct
GKGRQK

SEQ ID NO: 13189 - protein, 6 aa, ARTIFICIAL SEQUENCE
  Synthetic Construct
GKGRRK

SEQ ID NO: 13190 - protein, 6 aa, ARTIFICIAL SEQUENCE
  Synthetic Construct
GKGRSK

SEQ ID NO: 13191 - protein, 6 aa, ARTIFICIAL SEQUENCE
  Synthetic Construct
GKGRTK

SEQ ID NO: 13192 - protein, 6 aa, ARTIFICIAL SEQUENCE
  Synthetic Construct
GKGRYK

SEQ ID NO: 13193 - protein, 6 aa, ARTIFICIAL SEQUENCE
  Synthetic Construct
GKGSAK

SEQ ID NO: 13194 - protein, 6 aa, ARTIFICIAL SEQUENCE
  Synthetic Construct
GKGSDK

SEQ ID NO: 13195 - protein, 6 aa, ARTIFICIAL SEQUENCE
  Synthetic Construct
GKGSEK

SEQ ID NO: 13196 - protein, 6 aa, ARTIFICIAL SEQUENCE
  Synthetic Construct
GKGSFK

SEQ ID NO: 13197 - protein, 6 aa, ARTIFICIAL SEQUENCE
  Synthetic Construct
GKGSGK

SEQ ID NO: 13198 - protein, 6 aa, ARTIFICIAL SEQUENCE
  Synthetic Construct
GKGSHK

SEQ ID NO: 13199 - protein, 6 aa, ARTIFICIAL SEQUENCE
  Synthetic Construct
GKGSIK

SEQ ID NO: 13200 - protein, 6 aa, ARTIFICIAL SEQUENCE
  Synthetic Construct
GKGSLK

SEQ ID NO: 13201 - protein, 6 aa, ARTIFICIAL SEQUENCE
  Synthetic Construct
GKGSNK

SEQ ID NO: 13202 - protein, 6 aa, ARTIFICIAL SEQUENCE
  Synthetic Construct
GKGSQK

SEQ ID NO: 13203 - protein, 6 aa, ARTIFICIAL SEQUENCE
  Synthetic Construct
GKGSRK

SEQ ID NO: 13204 - protein, 6 aa, ARTIFICIAL SEQUENCE
  Synthetic Construct
GKGSSK

SEQ ID NO: 13205 - protein, 6 aa, ARTIFICIAL SEQUENCE
  Synthetic Construct
GKGSTK

SEQ ID NO: 13206 - protein, 6 aa, ARTIFICIAL SEQUENCE
  Synthetic Construct
GKGSYK

SEQ ID NO: 13207 - protein, 6 aa, ARTIFICIAL SEQUENCE
  Synthetic Construct
GKGTAK

SEQ ID NO: 13208 - protein, 6 aa, ARTIFICIAL SEQUENCE
  Synthetic Construct
GKGTDK

SEQ ID NO: 13209 - protein, 6 aa, ARTIFICIAL SEQUENCE
  Synthetic Construct
GKGTEK

SEQ ID NO: 13210 - protein, 6 aa, ARTIFICIAL SEQUENCE
  Synthetic Construct
GKGTFK

SEQ ID NO: 13211 - protein, 6 aa, ARTIFICIAL SEQUENCE
  Synthetic Construct
GKGTGK

SEQ ID NO: 13212 - protein, 6 aa, ARTIFICIAL SEQUENCE
  Synthetic Construct
GKGTHK

SEQ ID NO: 13213 - protein, 6 aa, ARTIFICIAL SEQUENCE
  Synthetic Construct
GKGTIK

SEQ ID NO: 13214 - protein, 6 aa, ARTIFICIAL SEQUENCE
  Synthetic Construct
GKGTLK

SEQ ID NO: 13215 - protein, 6 aa, ARTIFICIAL SEQUENCE
  Synthetic Construct
GKGTNK

SEQ ID NO: 13216 - protein, 6 aa, ARTIFICIAL SEQUENCE
  Synthetic Construct
GKGTQK

SEQ ID NO: 13217 - protein, 6 aa, ARTIFICIAL SEQUENCE
  Synthetic Construct
GKGTRK

SEQ ID NO: 13218 - protein, 6 aa, ARTIFICIAL SEQUENCE
  Synthetic Construct
GKGTSK

SEQ ID NO: 13219 - protein, 6 aa, ARTIFICIAL SEQUENCE
  Synthetic Construct
GKGTTK

SEQ ID NO: 13220 - protein, 6 aa, ARTIFICIAL SEQUENCE
  Synthetic Construct
GKGTYK

SEQ ID NO: 13221 - protein, 6 aa, ARTIFICIAL SEQUENCE
  Synthetic Construct
GKGYAK

SEQ ID NO: 13222 - protein, 6 aa, ARTIFICIAL SEQUENCE
  Synthetic Construct
GKGYDK

SEQ ID NO: 13223 - protein, 6 aa, ARTIFICIAL SEQUENCE
  Synthetic Construct
GKGYEK

SEQ ID NO: 13224 - protein, 6 aa, ARTIFICIAL SEQUENCE
  Synthetic Construct
GKGYFK

SEQ ID NO: 13225 - protein, 6 aa, ARTIFICIAL SEQUENCE
  Synthetic Construct
GKGYGK

SEQ ID NO: 13226 - protein, 6 aa, ARTIFICIAL SEQUENCE
  Synthetic Construct
GKGYHK

SEQ ID NO: 13227 - protein, 6 aa, ARTIFICIAL SEQUENCE
  Synthetic Construct
GKGYIK

SEQ ID NO: 13228 - protein, 6 aa, ARTIFICIAL SEQUENCE
  Synthetic Construct
GKGYLK

SEQ ID NO: 13229 - protein, 6 aa, ARTIFICIAL SEQUENCE
  Synthetic Construct
GKGYNK

SEQ ID NO: 13230 - protein, 6 aa, ARTIFICIAL SEQUENCE
  Synthetic Construct
GKGYQK

SEQ ID NO: 13231 - protein, 6 aa, ARTIFICIAL SEQUENCE
  Synthetic Construct
GKGYRK

SEQ ID NO: 13232 - protein, 6 aa, ARTIFICIAL SEQUENCE
  Synthetic Construct
GKGYSK

SEQ ID NO: 13233 - protein, 6 aa, ARTIFICIAL SEQUENCE
  Synthetic Construct
GKGYTK

SEQ ID NO: 13234 - protein, 6 aa, ARTIFICIAL SEQUENCE
  Synthetic Construct
GKGYYK

SEQ ID NO: 13235 - protein, 6 aa, ARTIFICIAL SEQUENCE
  Synthetic Construct
GKHAAK

SEQ ID NO: 13236 - protein, 6 aa, ARTIFICIAL SEQUENCE
  Synthetic Construct
GKHADK

SEQ ID NO: 13237 - protein, 6 aa, ARTIFICIAL SEQUENCE
  Synthetic Construct
GKHAEK

SEQ ID NO: 13238 - protein, 6 aa, ARTIFICIAL SEQUENCE
  Synthetic Construct
GKHAFK

SEQ ID NO: 13239 - protein, 6 aa, ARTIFICIAL SEQUENCE
  Synthetic Construct
GKHAGK

SEQ ID NO: 13240 - protein, 6 aa, ARTIFICIAL SEQUENCE
  Synthetic Construct
GKHAHK

SEQ ID NO: 13241 - protein, 6 aa, ARTIFICIAL SEQUENCE
  Synthetic Construct
GKHAIK

SEQ ID NO: 13242 - protein, 6 aa, ARTIFICIAL SEQUENCE
  Synthetic Construct
GKHALK

SEQ ID NO: 13243 - protein, 6 aa, ARTIFICIAL SEQUENCE
  Synthetic Construct
GKHANK

SEQ ID NO: 13244 - protein, 6 aa, ARTIFICIAL SEQUENCE
  Synthetic Construct
GKHAQK

SEQ ID NO: 13245 - protein, 6 aa, ARTIFICIAL SEQUENCE
  Synthetic Construct
GKHARK

SEQ ID NO: 13246 - protein, 6 aa, ARTIFICIAL SEQUENCE
  Synthetic Construct
GKHASK

SEQ ID NO: 13247 - protein, 6 aa, ARTIFICIAL SEQUENCE
  Synthetic Construct
GKHATK

SEQ ID NO: 13248 - protein, 6 aa, ARTIFICIAL SEQUENCE
  Synthetic Construct
GKHAYK

SEQ ID NO: 13249 - protein, 6 aa, ARTIFICIAL SEQUENCE
  Synthetic Construct
GKHDAK

SEQ ID NO: 13250 - protein, 6 aa, ARTIFICIAL SEQUENCE
  Synthetic Construct
GKHDDK

SEQ ID NO: 13251 - protein, 6 aa, ARTIFICIAL SEQUENCE
  Synthetic Construct
GKHDEK

SEQ ID NO: 13252 - protein, 6 aa, ARTIFICIAL SEQUENCE
  Synthetic Construct
GKHDFK

SEQ ID NO: 13253 - protein, 6 aa, ARTIFICIAL SEQUENCE
  Synthetic Construct
GKHDGK

SEQ ID NO: 13254 - protein, 6 aa, ARTIFICIAL SEQUENCE
  Synthetic Construct
GKHDHK

SEQ ID NO: 13255 - protein, 6 aa, ARTIFICIAL SEQUENCE
  Synthetic Construct
GKHDIK

SEQ ID NO: 13256 - protein, 6 aa, ARTIFICIAL SEQUENCE
  Synthetic Construct
GKHDLK

SEQ ID NO: 13257 - protein, 6 aa, ARTIFICIAL SEQUENCE
  Synthetic Construct
GKHDNK

SEQ ID NO: 13258 - protein, 6 aa, ARTIFICIAL SEQUENCE
  Synthetic Construct
GKHDQK

SEQ ID NO: 13259 - protein, 6 aa, ARTIFICIAL SEQUENCE
  Synthetic Construct
GKHDRK

SEQ ID NO: 13260 - protein, 6 aa, ARTIFICIAL SEQUENCE
  Synthetic Construct
GKHDSK

SEQ ID NO: 13261 - protein, 6 aa, ARTIFICIAL SEQUENCE
  Synthetic Construct
GKHDTK

SEQ ID NO: 13262 - protein, 6 aa, ARTIFICIAL SEQUENCE
  Synthetic Construct
GKHDYK

SEQ ID NO: 13263 - protein, 6 aa, ARTIFICIAL SEQUENCE
  Synthetic Construct
GKHEAK

SEQ ID NO: 13264 - protein, 6 aa, ARTIFICIAL SEQUENCE
  Synthetic Construct
GKHEDK

SEQ ID NO: 13265 - protein, 6 aa, ARTIFICIAL SEQUENCE
  Synthetic Construct
GKHEEK

SEQ ID NO: 13266 - protein, 6 aa, ARTIFICIAL SEQUENCE
  Synthetic Construct
GKHEFK

SEQ ID NO: 13267 - protein, 6 aa, ARTIFICIAL SEQUENCE
  Synthetic Construct
GKHEGK

SEQ ID NO: 13268 - protein, 6 aa, ARTIFICIAL SEQUENCE
  Synthetic Construct
GKHEHK

SEQ ID NO: 13269 - protein, 6 aa, ARTIFICIAL SEQUENCE
  Synthetic Construct
GKHEIK

SEQ ID NO: 13270 - protein, 6 aa, ARTIFICIAL SEQUENCE
  Synthetic Construct
GKHELK

SEQ ID NO: 13271 - protein, 6 aa, ARTIFICIAL SEQUENCE
  Synthetic Construct
GKHENK

SEQ ID NO: 13272 - protein, 6 aa, ARTIFICIAL SEQUENCE
  Synthetic Construct
GKHEQK

SEQ ID NO: 13273 - protein, 6 aa, ARTIFICIAL SEQUENCE
  Synthetic Construct
GKHERK

SEQ ID NO: 13274 - protein, 6 aa, ARTIFICIAL SEQUENCE
  Synthetic Construct
GKHESK

SEQ ID NO: 13275 - protein, 6 aa, ARTIFICIAL SEQUENCE
  Synthetic Construct
GKHETK

SEQ ID NO: 13276 - protein, 6 aa, ARTIFICIAL SEQUENCE
  Synthetic Construct
GKHEYK

SEQ ID NO: 13277 - protein, 6 aa, ARTIFICIAL SEQUENCE
  Synthetic Construct
GKHFAK

SEQ ID NO: 13278 - protein, 6 aa, ARTIFICIAL SEQUENCE
  Synthetic Construct
GKHFDK

SEQ ID NO: 13279 - protein, 6 aa, ARTIFICIAL SEQUENCE
  Synthetic Construct
GKHFEK

SEQ ID NO: 13280 - protein, 6 aa, ARTIFICIAL SEQUENCE
  Synthetic Construct
GKHFFK

SEQ ID NO: 13281 - protein, 6 aa, ARTIFICIAL SEQUENCE
  Synthetic Construct
GKHFGK

SEQ ID NO: 13282 - protein, 6 aa, ARTIFICIAL SEQUENCE
  Synthetic Construct
GKHFHK

SEQ ID NO: 13283 - protein, 6 aa, ARTIFICIAL SEQUENCE
  Synthetic Construct
GKHFIK

SEQ ID NO: 13284 - protein, 6 aa, ARTIFICIAL SEQUENCE
  Synthetic Construct
GKHFLK

SEQ ID NO: 13285 - protein, 6 aa, ARTIFICIAL SEQUENCE
  Synthetic Construct
GKHFNK

SEQ ID NO: 13286 - protein, 6 aa, ARTIFICIAL SEQUENCE
  Synthetic Construct
GKHFQK

SEQ ID NO: 13287 - protein, 6 aa, ARTIFICIAL SEQUENCE
  Synthetic Construct
GKHFRK

SEQ ID NO: 13288 - protein, 6 aa, ARTIFICIAL SEQUENCE
  Synthetic Construct
GKHFSK

SEQ ID NO: 13289 - protein, 6 aa, ARTIFICIAL SEQUENCE
  Synthetic Construct
GKHFTK

SEQ ID NO: 13290 - protein, 6 aa, ARTIFICIAL SEQUENCE
  Synthetic Construct
GKHFYK

SEQ ID NO: 13291 - protein, 6 aa, ARTIFICIAL SEQUENCE
  Synthetic Construct
GKHGAK

SEQ ID NO: 13292 - protein, 6 aa, ARTIFICIAL SEQUENCE
  Synthetic Construct
GKHGDK

SEQ ID NO: 13293 - protein, 6 aa, ARTIFICIAL SEQUENCE
  Synthetic Construct
GKHGEK

SEQ ID NO: 13294 - protein, 6 aa, ARTIFICIAL SEQUENCE
  Synthetic Construct
GKHGFK

SEQ ID NO: 13295 - protein, 6 aa, ARTIFICIAL SEQUENCE
  Synthetic Construct
GKHGGK

SEQ ID NO: 13296 - protein, 6 aa, ARTIFICIAL SEQUENCE
  Synthetic Construct
GKHGHK

SEQ ID NO: 13297 - protein, 6 aa, ARTIFICIAL SEQUENCE
  Synthetic Construct
GKHGIK

SEQ ID NO: 13298 - protein, 6 aa, ARTIFICIAL SEQUENCE
  Synthetic Construct
GKHGLK

SEQ ID NO: 13299 - protein, 6 aa, ARTIFICIAL SEQUENCE
  Synthetic Construct
GKHGNK

SEQ ID NO: 13300 - protein, 6 aa, ARTIFICIAL SEQUENCE
  Synthetic Construct
GKHGQK

SEQ ID NO: 13301 - protein, 6 aa, ARTIFICIAL SEQUENCE
  Synthetic Construct
GKHGRK

SEQ ID NO: 13302 - protein, 6 aa, ARTIFICIAL SEQUENCE
  Synthetic Construct
GKHGSK

SEQ ID NO: 13303 - protein, 6 aa, ARTIFICIAL SEQUENCE
  Synthetic Construct
GKHGTK

SEQ ID NO: 13304 - protein, 6 aa, ARTIFICIAL SEQUENCE
  Synthetic Construct
GKHGYK

SEQ ID NO: 13305 - protein, 6 aa, ARTIFICIAL SEQUENCE
  Synthetic Construct
GKHHAK

SEQ ID NO: 13306 - protein, 6 aa, ARTIFICIAL SEQUENCE
  Synthetic Construct
GKHHDK

SEQ ID NO: 13307 - protein, 6 aa, ARTIFICIAL SEQUENCE
  Synthetic Construct
GKHHEK

SEQ ID NO: 13308 - protein, 6 aa, ARTIFICIAL SEQUENCE
  Synthetic Construct
GKHHFK

SEQ ID NO: 13309 - protein, 6 aa, ARTIFICIAL SEQUENCE
  Synthetic Construct
GKHHGK

SEQ ID NO: 13310 - protein, 6 aa, ARTIFICIAL SEQUENCE
  Synthetic Construct
GKHHHK

SEQ ID NO: 13311 - protein, 6 aa, ARTIFICIAL SEQUENCE
  Synthetic Construct
GKHHIK

SEQ ID NO: 13312 - protein, 6 aa, ARTIFICIAL SEQUENCE
  Synthetic Construct
GKHHLK

SEQ ID NO: 13313 - protein, 6 aa, ARTIFICIAL SEQUENCE
  Synthetic Construct
GKHHNK

SEQ ID NO: 13314 - protein, 6 aa, ARTIFICIAL SEQUENCE
  Synthetic Construct
GKHHQK

SEQ ID NO: 13315 - protein, 6 aa, ARTIFICIAL SEQUENCE
  Synthetic Construct
GKHHRK

SEQ ID NO: 13316 - protein, 6 aa, ARTIFICIAL SEQUENCE
  Synthetic Construct
GKHHSK

SEQ ID NO: 13317 - protein, 6 aa, ARTIFICIAL SEQUENCE
  Synthetic Construct
GKHHTK

SEQ ID NO: 13318 - protein, 6 aa, ARTIFICIAL SEQUENCE
  Synthetic Construct
GKHHYK

SEQ ID NO: 13319 - protein, 6 aa, ARTIFICIAL SEQUENCE
  Synthetic Construct
GKHIAK

SEQ ID NO: 13320 - protein, 6 aa, ARTIFICIAL SEQUENCE
  Synthetic Construct
GKHIDK

SEQ ID NO: 13321 - protein, 6 aa, ARTIFICIAL SEQUENCE
  Synthetic Construct
GKHIEK

SEQ ID NO: 13322 - protein, 6 aa, ARTIFICIAL SEQUENCE
  Synthetic Construct
GKHIFK

SEQ ID NO: 13323 - protein, 6 aa, ARTIFICIAL SEQUENCE
  Synthetic Construct
GKHIGK

SEQ ID NO: 13324 - protein, 6 aa, ARTIFICIAL SEQUENCE
  Synthetic Construct
GKHIHK

SEQ ID NO: 13325 - protein, 6 aa, ARTIFICIAL SEQUENCE
  Synthetic Construct
GKHIIK

SEQ ID NO: 13326 - protein, 6 aa, ARTIFICIAL SEQUENCE
  Synthetic Construct
GKHILK

SEQ ID NO: 13327 - protein, 6 aa, ARTIFICIAL SEQUENCE
  Synthetic Construct
GKHINK

SEQ ID NO: 13328 - protein, 6 aa, ARTIFICIAL SEQUENCE
  Synthetic Construct
GKHIQK

SEQ ID NO: 13329 - protein, 6 aa, ARTIFICIAL SEQUENCE
  Synthetic Construct
GKHIRK

SEQ ID NO: 13330 - protein, 6 aa, ARTIFICIAL SEQUENCE
  Synthetic Construct
GKHISK

SEQ ID NO: 13331 - protein, 6 aa, ARTIFICIAL SEQUENCE
  Synthetic Construct
GKHITK

SEQ ID NO: 13332 - protein, 6 aa, ARTIFICIAL SEQUENCE
  Synthetic Construct
GKHIYK

SEQ ID NO: 13333 - protein, 6 aa, ARTIFICIAL SEQUENCE
  Synthetic Construct
GKHLAK

SEQ ID NO: 13334 - protein, 6 aa, ARTIFICIAL SEQUENCE
  Synthetic Construct
GKHLDK

SEQ ID NO: 13335 - protein, 6 aa, ARTIFICIAL SEQUENCE
  Synthetic Construct
GKHLEK

SEQ ID NO: 13336 - protein, 6 aa, ARTIFICIAL SEQUENCE
  Synthetic Construct
GKHLFK

SEQ ID NO: 13337 - protein, 6 aa, ARTIFICIAL SEQUENCE
  Synthetic Construct
GKHLGK

SEQ ID NO: 13338 - protein, 6 aa, ARTIFICIAL SEQUENCE
  Synthetic Construct
GKHLHK

SEQ ID NO: 13339 - protein, 6 aa, ARTIFICIAL SEQUENCE
  Synthetic Construct
GKHLIK

SEQ ID NO: 13340 - protein, 6 aa, ARTIFICIAL SEQUENCE
  Synthetic Construct
GKHLLK

SEQ ID NO: 13341 - protein, 6 aa, ARTIFICIAL SEQUENCE
  Synthetic Construct
GKHLNK

SEQ ID NO: 13342 - protein, 6 aa, ARTIFICIAL SEQUENCE
  Synthetic Construct
GKHLQK

SEQ ID NO: 13343 - protein, 6 aa, ARTIFICIAL SEQUENCE
  Synthetic Construct
GKHLRK

SEQ ID NO: 13344 - protein, 6 aa, ARTIFICIAL SEQUENCE
  Synthetic Construct
GKHLSK

SEQ ID NO: 13345 - protein, 6 aa, ARTIFICIAL SEQUENCE
  Synthetic Construct
GKHLTK

SEQ ID NO: 13346 - protein, 6 aa, ARTIFICIAL SEQUENCE
  Synthetic Construct
GKHLYK

SEQ ID NO: 13347 - protein, 6 aa, ARTIFICIAL SEQUENCE
  Synthetic Construct
GKHNAK

SEQ ID NO: 13348 - protein, 6 aa, ARTIFICIAL SEQUENCE
  Synthetic Construct
GKHNDK

SEQ ID NO: 13349 - protein, 6 aa, ARTIFICIAL SEQUENCE
  Synthetic Construct
GKHNEK

SEQ ID NO: 13350 - protein, 6 aa, ARTIFICIAL SEQUENCE
  Synthetic Construct
GKHNFK

SEQ ID NO: 13351 - protein, 6 aa, ARTIFICIAL SEQUENCE
  Synthetic Construct
GKHNGK

SEQ ID NO: 13352 - protein, 6 aa, ARTIFICIAL SEQUENCE
  Synthetic Construct
GKHNHK

SEQ ID NO: 13353 - protein, 6 aa, ARTIFICIAL SEQUENCE
  Synthetic Construct
GKHNIK

SEQ ID NO: 13354 - protein, 6 aa, ARTIFICIAL SEQUENCE
  Synthetic Construct
GKHNLK

SEQ ID NO: 13355 - protein, 6 aa, ARTIFICIAL SEQUENCE
  Synthetic Construct
GKHNNK

SEQ ID NO: 13356 - protein, 6 aa, ARTIFICIAL SEQUENCE
  Synthetic Construct
GKHNQK

SEQ ID NO: 13357 - protein, 6 aa, ARTIFICIAL SEQUENCE
  Synthetic Construct
GKHNRK

SEQ ID NO: 13358 - protein, 6 aa, ARTIFICIAL SEQUENCE
  Synthetic Construct
GKHNSK

SEQ ID NO: 13359 - protein, 6 aa, ARTIFICIAL SEQUENCE
  Synthetic Construct
GKHNTK

SEQ ID NO: 13360 - protein, 6 aa, ARTIFICIAL SEQUENCE
  Synthetic Construct
GKHNYK

SEQ ID NO: 13361 - protein, 6 aa, ARTIFICIAL SEQUENCE
  Synthetic Construct
GKHQAK

SEQ ID NO: 13362 - protein, 6 aa, ARTIFICIAL SEQUENCE
  Synthetic Construct
GKHQDK

SEQ ID NO: 13363 - protein, 6 aa, ARTIFICIAL SEQUENCE
  Synthetic Construct
GKHQEK

SEQ ID NO: 13364 - protein, 6 aa, ARTIFICIAL SEQUENCE
  Synthetic Construct
GKHQFK

SEQ ID NO: 13365 - protein, 6 aa, ARTIFICIAL SEQUENCE
  Synthetic Construct
GKHQGK

SEQ ID NO: 13366 - protein, 6 aa, ARTIFICIAL SEQUENCE
  Synthetic Construct
GKHQHK

SEQ ID NO: 13367 - protein, 6 aa, ARTIFICIAL SEQUENCE
  Synthetic Construct
GKHQIK

SEQ ID NO: 13368 - protein, 6 aa, ARTIFICIAL SEQUENCE
  Synthetic Construct
GKHQLK

SEQ ID NO: 13369 - protein, 6 aa, ARTIFICIAL SEQUENCE
  Synthetic Construct
GKHQNK

SEQ ID NO: 13370 - protein, 6 aa, ARTIFICIAL SEQUENCE
  Synthetic Construct
GKHQQK

SEQ ID NO: 13371 - protein, 6 aa, ARTIFICIAL SEQUENCE
  Synthetic Construct
GKHQRK

SEQ ID NO: 13372 - protein, 6 aa, ARTIFICIAL SEQUENCE
  Synthetic Construct
GKHQSK

SEQ ID NO: 13373 - protein, 6 aa, ARTIFICIAL SEQUENCE
  Synthetic Construct
GKHQTK

SEQ ID NO: 13374 - protein, 6 aa, ARTIFICIAL SEQUENCE
  Synthetic Construct
GKHQYK

SEQ ID NO: 13375 - protein, 6 aa, ARTIFICIAL SEQUENCE
  Synthetic Construct
GKHRAK

SEQ ID NO: 13376 - protein, 6 aa, ARTIFICIAL SEQUENCE
  Synthetic Construct
GKHRDK

SEQ ID NO: 13377 - protein, 6 aa, ARTIFICIAL SEQUENCE
  Synthetic Construct
GKHREK

SEQ ID NO: 13378 - protein, 6 aa, ARTIFICIAL SEQUENCE
  Synthetic Construct
GKHRFK

SEQ ID NO: 13379 - protein, 6 aa, ARTIFICIAL SEQUENCE
  Synthetic Construct
GKHRGK

SEQ ID NO: 13380 - protein, 6 aa, ARTIFICIAL SEQUENCE
  Synthetic Construct
GKHRHK

SEQ ID NO: 13381 - protein, 6 aa, ARTIFICIAL SEQUENCE
  Synthetic Construct
GKHRIK

SEQ ID NO: 13382 - protein, 6 aa, ARTIFICIAL SEQUENCE
  Synthetic Construct
GKHRLK

SEQ ID NO: 13383 - protein, 6 aa, ARTIFICIAL SEQUENCE
  Synthetic Construct
GKHRNK

SEQ ID NO: 13384 - protein, 6 aa, ARTIFICIAL SEQUENCE
  Synthetic Construct
GKHRQK

SEQ ID NO: 13385 - protein, 6 aa, ARTIFICIAL SEQUENCE
  Synthetic Construct
GKHRRK

SEQ ID NO: 13386 - protein, 6 aa, ARTIFICIAL SEQUENCE
  Synthetic Construct
GKHRSK

SEQ ID NO: 13387 - protein, 6 aa, ARTIFICIAL SEQUENCE
  Synthetic Construct
GKHRTK

SEQ ID NO: 13388 - protein, 6 aa, ARTIFICIAL SEQUENCE
  Synthetic Construct
GKHRYK

SEQ ID NO: 13389 - protein, 6 aa, ARTIFICIAL SEQUENCE
  Synthetic Construct
GKHSAK

SEQ ID NO: 13390 - protein, 6 aa, ARTIFICIAL SEQUENCE
  Synthetic Construct
GKHSDK

SEQ ID NO: 13391 - protein, 6 aa, ARTIFICIAL SEQUENCE
  Synthetic Construct
GKHSEK

SEQ ID NO: 13392 - protein, 6 aa, ARTIFICIAL SEQUENCE
  Synthetic Construct
GKHSFK

SEQ ID NO: 13393 - protein, 6 aa, ARTIFICIAL SEQUENCE
  Synthetic Construct
GKHSGK

SEQ ID NO: 13394 - protein, 6 aa, ARTIFICIAL SEQUENCE
  Synthetic Construct
GKHSHK

SEQ ID NO: 13395 - protein, 6 aa, ARTIFICIAL SEQUENCE
  Synthetic Construct
GKHSIK

SEQ ID NO: 13396 - protein, 6 aa, ARTIFICIAL SEQUENCE
  Synthetic Construct
GKHSLK

SEQ ID NO: 13397 - protein, 6 aa, ARTIFICIAL SEQUENCE
  Synthetic Construct
GKHSNK

SEQ ID NO: 13398 - protein, 6 aa, ARTIFICIAL SEQUENCE
  Synthetic Construct
GKHSQK

SEQ ID NO: 13399 - protein, 6 aa, ARTIFICIAL SEQUENCE
  Synthetic Construct
GKHSRK

SEQ ID NO: 13400 - protein, 6 aa, ARTIFICIAL SEQUENCE
  Synthetic Construct
GKHSSK

SEQ ID NO: 13401 - protein, 6 aa, ARTIFICIAL SEQUENCE
  Synthetic Construct
GKHSTK

SEQ ID NO: 13402 - protein, 6 aa, ARTIFICIAL SEQUENCE
  Synthetic Construct
GKHSYK

SEQ ID NO: 13403 - protein, 6 aa, ARTIFICIAL SEQUENCE
  Synthetic Construct
GKHTAK

SEQ ID NO: 13404 - protein, 6 aa, ARTIFICIAL SEQUENCE
  Synthetic Construct
GKHTDK

SEQ ID NO: 13405 - protein, 6 aa, ARTIFICIAL SEQUENCE
  Synthetic Construct
GKHTEK

SEQ ID NO: 13406 - protein, 6 aa, ARTIFICIAL SEQUENCE
  Synthetic Construct
GKHTFK

SEQ ID NO: 13407 - protein, 6 aa, ARTIFICIAL SEQUENCE
  Synthetic Construct
GKHTGK

SEQ ID NO: 13408 - protein, 6 aa, ARTIFICIAL SEQUENCE
  Synthetic Construct
GKHTHK

SEQ ID NO: 13409 - protein, 6 aa, ARTIFICIAL SEQUENCE
  Synthetic Construct
GKHTIK

SEQ ID NO: 13410 - protein, 6 aa, ARTIFICIAL SEQUENCE
  Synthetic Construct
GKHTLK

SEQ ID NO: 13411 - protein, 6 aa, ARTIFICIAL SEQUENCE
  Synthetic Construct
GKHTNK

SEQ ID NO: 13412 - protein, 6 aa, ARTIFICIAL SEQUENCE
  Synthetic Construct
GKHTQK

SEQ ID NO: 13413 - protein, 6 aa, ARTIFICIAL SEQUENCE
  Synthetic Construct
GKHTRK

SEQ ID NO: 13414 - protein, 6 aa, ARTIFICIAL SEQUENCE
  Synthetic Construct
GKHTSK

SEQ ID NO: 13415 - protein, 6 aa, ARTIFICIAL SEQUENCE
  Synthetic Construct
GKHTTK

SEQ ID NO: 13416 - protein, 6 aa, ARTIFICIAL SEQUENCE
  Synthetic Construct
GKHTYK

SEQ ID NO: 13417 - protein, 6 aa, ARTIFICIAL SEQUENCE
  Synthetic Construct
GKHYAK

SEQ ID NO: 13418 - protein, 6 aa, ARTIFICIAL SEQUENCE
  Synthetic Construct
GKHYDK

SEQ ID NO: 13419 - protein, 6 aa, ARTIFICIAL SEQUENCE
  Synthetic Construct
GKHYEK

SEQ ID NO: 13420 - protein, 6 aa, ARTIFICIAL SEQUENCE
  Synthetic Construct
GKHYFK

SEQ ID NO: 13421 - protein, 6 aa, ARTIFICIAL SEQUENCE
  Synthetic Construct
GKHYGK

SEQ ID NO: 13422 - protein, 6 aa, ARTIFICIAL SEQUENCE
  Synthetic Construct
GKHYHK

SEQ ID NO: 13423 - protein, 6 aa, ARTIFICIAL SEQUENCE
  Synthetic Construct
GKHYIK

SEQ ID NO: 13424 - protein, 6 aa, ARTIFICIAL SEQUENCE
  Synthetic Construct
GKHYLK

SEQ ID NO: 13425 - protein, 6 aa, ARTIFICIAL SEQUENCE
  Synthetic Construct
GKHYNK

SEQ ID NO: 13426 - protein, 6 aa, ARTIFICIAL SEQUENCE
  Synthetic Construct
GKHYQK

SEQ ID NO: 13427 - protein, 6 aa, ARTIFICIAL SEQUENCE
  Synthetic Construct
GKHYRK

SEQ ID NO: 13428 - protein, 6 aa, ARTIFICIAL SEQUENCE
  Synthetic Construct
GKHYSK

SEQ ID NO: 13429 - protein, 6 aa, ARTIFICIAL SEQUENCE
  Synthetic Construct
GKHYTK

SEQ ID NO: 13430 - protein, 6 aa, ARTIFICIAL SEQUENCE
  Synthetic Construct
GKHYYK

SEQ ID NO: 13431 - protein, 6 aa, ARTIFICIAL SEQUENCE
  Synthetic Construct
GKIAAK

SEQ ID NO: 13432 - protein, 6 aa, ARTIFICIAL SEQUENCE
  Synthetic Construct
GKIADK

SEQ ID NO: 13433 - protein, 6 aa, ARTIFICIAL SEQUENCE
  Synthetic Construct
GKIAEK

SEQ ID NO: 13434 - protein, 6 aa, ARTIFICIAL SEQUENCE
  Synthetic Construct
GKIAFK

SEQ ID NO: 13435 - protein, 6 aa, ARTIFICIAL SEQUENCE
  Synthetic Construct
GKIAGK

SEQ ID NO: 13436 - protein, 6 aa, ARTIFICIAL SEQUENCE
  Synthetic Construct
GKIAHK

SEQ ID NO: 13437 - protein, 6 aa, ARTIFICIAL SEQUENCE
  Synthetic Construct
GKIAIK

SEQ ID NO: 13438 - protein, 6 aa, ARTIFICIAL SEQUENCE
  Synthetic Construct
GKIALK

SEQ ID NO: 13439 - protein, 6 aa, ARTIFICIAL SEQUENCE
  Synthetic Construct
GKIANK

SEQ ID NO: 13440 - protein, 6 aa, ARTIFICIAL SEQUENCE
  Synthetic Construct
GKIAQK

SEQ ID NO: 13441 - protein, 6 aa, ARTIFICIAL SEQUENCE
  Synthetic Construct
GKIARK

SEQ ID NO: 13442 - protein, 6 aa, ARTIFICIAL SEQUENCE
  Synthetic Construct
GKIASK

SEQ ID NO: 13443 - protein, 6 aa, ARTIFICIAL SEQUENCE
  Synthetic Construct
GKIATK

SEQ ID NO: 13444 - protein, 6 aa, ARTIFICIAL SEQUENCE
  Synthetic Construct
GKIAYK

SEQ ID NO: 13445 - protein, 6 aa, ARTIFICIAL SEQUENCE
  Synthetic Construct
GKIDAK

SEQ ID NO: 13446 - protein, 6 aa, ARTIFICIAL SEQUENCE
  Synthetic Construct
GKIDDK

SEQ ID NO: 13447 - protein, 6 aa, ARTIFICIAL SEQUENCE
  Synthetic Construct
GKIDEK

SEQ ID NO: 13448 - protein, 6 aa, ARTIFICIAL SEQUENCE
  Synthetic Construct
GKIDFK

SEQ ID NO: 13449 - protein, 6 aa, ARTIFICIAL SEQUENCE
  Synthetic Construct
GKIDGK

SEQ ID NO: 13450 - protein, 6 aa, ARTIFICIAL SEQUENCE
  Synthetic Construct
GKIDHK

SEQ ID NO: 13451 - protein, 6 aa, ARTIFICIAL SEQUENCE
  Synthetic Construct
GKIDIK

SEQ ID NO: 13452 - protein, 6 aa, ARTIFICIAL SEQUENCE
  Synthetic Construct
GKIDLK

SEQ ID NO: 13453 - protein, 6 aa, ARTIFICIAL SEQUENCE
  Synthetic Construct
GKIDNK

SEQ ID NO: 13454 - protein, 6 aa, ARTIFICIAL SEQUENCE
  Synthetic Construct
GKIDQK

SEQ ID NO: 13455 - protein, 6 aa, ARTIFICIAL SEQUENCE
  Synthetic Construct
GKIDRK

SEQ ID NO: 13456 - protein, 6 aa, ARTIFICIAL SEQUENCE
  Synthetic Construct
GKIDSK

SEQ ID NO: 13457 - protein, 6 aa, ARTIFICIAL SEQUENCE
  Synthetic Construct
GKIDTK

SEQ ID NO: 13458 - protein, 6 aa, ARTIFICIAL SEQUENCE
  Synthetic Construct
GKIDYK

SEQ ID NO: 13459 - protein, 6 aa, ARTIFICIAL SEQUENCE
  Synthetic Construct
GKIEAK

SEQ ID NO: 13460 - protein, 6 aa, ARTIFICIAL SEQUENCE
  Synthetic Construct
GKIEDK

SEQ ID NO: 13461 - protein, 6 aa, ARTIFICIAL SEQUENCE
  Synthetic Construct
GKIEEK

SEQ ID NO: 13462 - protein, 6 aa, ARTIFICIAL SEQUENCE
  Synthetic Construct
GKIEFK

SEQ ID NO: 13463 - protein, 6 aa, ARTIFICIAL SEQUENCE
  Synthetic Construct
GKIEGK

SEQ ID NO: 13464 - protein, 6 aa, ARTIFICIAL SEQUENCE
  Synthetic Construct
GKIEHK

SEQ ID NO: 13465 - protein, 6 aa, ARTIFICIAL SEQUENCE
  Synthetic Construct
GKIEIK

SEQ ID NO: 13466 - protein, 6 aa, ARTIFICIAL SEQUENCE
  Synthetic Construct
GKIELK

SEQ ID NO: 13467 - protein, 6 aa, ARTIFICIAL SEQUENCE
  Synthetic Construct
GKIENK

SEQ ID NO: 13468 - protein, 6 aa, ARTIFICIAL SEQUENCE
  Synthetic Construct
GKIEQK

SEQ ID NO: 13469 - protein, 6 aa, ARTIFICIAL SEQUENCE
  Synthetic Construct
GKIERK

SEQ ID NO: 13470 - protein, 6 aa, ARTIFICIAL SEQUENCE
  Synthetic Construct
GKIESK

SEQ ID NO: 13471 - protein, 6 aa, ARTIFICIAL SEQUENCE
  Synthetic Construct
GKIETK

SEQ ID NO: 13472 - protein, 6 aa, ARTIFICIAL SEQUENCE
  Synthetic Construct
GKIEYK

SEQ ID NO: 13473 - protein, 6 aa, ARTIFICIAL SEQUENCE
  Synthetic Construct
GKIFAK

SEQ ID NO: 13474 - protein, 6 aa, ARTIFICIAL SEQUENCE
  Synthetic Construct
GKIFDK

SEQ ID NO: 13475 - protein, 6 aa, ARTIFICIAL SEQUENCE
  Synthetic Construct
GKIFEK

SEQ ID NO: 13476 - protein, 6 aa, ARTIFICIAL SEQUENCE
  Synthetic Construct
GKIFFK

SEQ ID NO: 13477 - protein, 6 aa, ARTIFICIAL SEQUENCE
  Synthetic Construct
GKIFGK

SEQ ID NO: 13478 - protein, 6 aa, ARTIFICIAL SEQUENCE
  Synthetic Construct
GKIFHK

SEQ ID NO: 13479 - protein, 6 aa, ARTIFICIAL SEQUENCE
  Synthetic Construct
GKIFIK

SEQ ID NO: 13480 - protein, 6 aa, ARTIFICIAL SEQUENCE
  Synthetic Construct
GKIFLK

SEQ ID NO: 13481 - protein, 6 aa, ARTIFICIAL SEQUENCE
  Synthetic Construct
GKIFNK

SEQ ID NO: 13482 - protein, 6 aa, ARTIFICIAL SEQUENCE
  Synthetic Construct
GKIFQK

SEQ ID NO: 13483 - protein, 6 aa, ARTIFICIAL SEQUENCE
  Synthetic Construct
GKIFRK

SEQ ID NO: 13484 - protein, 6 aa, ARTIFICIAL SEQUENCE
  Synthetic Construct
GKIFSK

SEQ ID NO: 13485 - protein, 6 aa, ARTIFICIAL SEQUENCE
  Synthetic Construct
GKIFTK

SEQ ID NO: 13486 - protein, 6 aa, ARTIFICIAL SEQUENCE
  Synthetic Construct
GKIFYK

SEQ ID NO: 13487 - protein, 6 aa, ARTIFICIAL SEQUENCE
  Synthetic Construct
GKIGAK

SEQ ID NO: 13488 - protein, 6 aa, ARTIFICIAL SEQUENCE
  Synthetic Construct
GKIGDK

SEQ ID NO: 13489 - protein, 6 aa, ARTIFICIAL SEQUENCE
  Synthetic Construct
GKIGEK

SEQ ID NO: 13490 - protein, 6 aa, ARTIFICIAL SEQUENCE
  Synthetic Construct
GKIGFK

SEQ ID NO: 13491 - protein, 6 aa, ARTIFICIAL SEQUENCE
  Synthetic Construct
GKIGGK

SEQ ID NO: 13492 - protein, 6 aa, ARTIFICIAL SEQUENCE
  Synthetic Construct
GKIGHK

SEQ ID NO: 13493 - protein, 6 aa, ARTIFICIAL SEQUENCE
  Synthetic Construct
GKIGIK

SEQ ID NO: 13494 - protein, 6 aa, ARTIFICIAL SEQUENCE
  Synthetic Construct
GKIGLK

SEQ ID NO: 13495 - protein, 6 aa, ARTIFICIAL SEQUENCE
  Synthetic Construct
GKIGNK

SEQ ID NO: 13496 - protein, 6 aa, ARTIFICIAL SEQUENCE
  Synthetic Construct
GKIGQK

SEQ ID NO: 13497 - protein, 6 aa, ARTIFICIAL SEQUENCE
  Synthetic Construct
GKIGRK

SEQ ID NO: 13498 - protein, 6 aa, ARTIFICIAL SEQUENCE
  Synthetic Construct
GKIGSK

SEQ ID NO: 13499 - protein, 6 aa, ARTIFICIAL SEQUENCE
  Synthetic Construct
GKIGTK

SEQ ID NO: 13500 - protein, 6 aa, ARTIFICIAL SEQUENCE
  Synthetic Construct
GKIGYK

SEQ ID NO: 13501 - protein, 6 aa, ARTIFICIAL SEQUENCE
  Synthetic Construct
GKIHAK

SEQ ID NO: 13502 - protein, 6 aa, ARTIFICIAL SEQUENCE
  Synthetic Construct
GKIHDK

SEQ ID NO: 13503 - protein, 6 aa, ARTIFICIAL SEQUENCE
  Synthetic Construct
GKIHEK

SEQ ID NO: 13504 - protein, 6 aa, ARTIFICIAL SEQUENCE
  Synthetic Construct
GKIHFK

SEQ ID NO: 13505 - protein, 6 aa, ARTIFICIAL SEQUENCE
  Synthetic Construct
GKIHGK

SEQ ID NO: 13506 - protein, 6 aa, ARTIFICIAL SEQUENCE
  Synthetic Construct
GKIHHK

SEQ ID NO: 13507 - protein, 6 aa, ARTIFICIAL SEQUENCE
  Synthetic Construct
GKIHIK

SEQ ID NO: 13508 - protein, 6 aa, ARTIFICIAL SEQUENCE
  Synthetic Construct
GKIHLK

SEQ ID NO: 13509 - protein, 6 aa, ARTIFICIAL SEQUENCE
  Synthetic Construct
GKIHNK

SEQ ID NO: 13510 - protein, 6 aa, ARTIFICIAL SEQUENCE
  Synthetic Construct
GKIHQK

SEQ ID NO: 13511 - protein, 6 aa, ARTIFICIAL SEQUENCE
  Synthetic Construct
GKIHRK

SEQ ID NO: 13512 - protein, 6 aa, ARTIFICIAL SEQUENCE
  Synthetic Construct
GKIHSK

SEQ ID NO: 13513 - protein, 6 aa, ARTIFICIAL SEQUENCE
  Synthetic Construct
GKIHTK

SEQ ID NO: 13514 - protein, 6 aa, ARTIFICIAL SEQUENCE
  Synthetic Construct
GKIHYK

SEQ ID NO: 13515 - protein, 6 aa, ARTIFICIAL SEQUENCE
  Synthetic Construct
GKIIAK

SEQ ID NO: 13516 - protein, 6 aa, ARTIFICIAL SEQUENCE
  Synthetic Construct
GKIIDK

SEQ ID NO: 13517 - protein, 6 aa, ARTIFICIAL SEQUENCE
  Synthetic Construct
GKIIEK

SEQ ID NO: 13518 - protein, 6 aa, ARTIFICIAL SEQUENCE
  Synthetic Construct
GKIIFK

SEQ ID NO: 13519 - protein, 6 aa, ARTIFICIAL SEQUENCE
  Synthetic Construct
GKIIGK

SEQ ID NO: 13520 - protein, 6 aa, ARTIFICIAL SEQUENCE
  Synthetic Construct
GKIIHK

SEQ ID NO: 13521 - protein, 6 aa, ARTIFICIAL SEQUENCE
  Synthetic Construct
GKIIIK

SEQ ID NO: 13522 - protein, 6 aa, ARTIFICIAL SEQUENCE
  Synthetic Construct
GKIILK

SEQ ID NO: 13523 - protein, 6 aa, ARTIFICIAL SEQUENCE
  Synthetic Construct
GKIINK

SEQ ID NO: 13524 - protein, 6 aa, ARTIFICIAL SEQUENCE
  Synthetic Construct
GKIIQK

SEQ ID NO: 13525 - protein, 6 aa, ARTIFICIAL SEQUENCE
  Synthetic Construct
GKIIRK

SEQ ID NO: 13526 - protein, 6 aa, ARTIFICIAL SEQUENCE
  Synthetic Construct
GKIISK

SEQ ID NO: 13527 - protein, 6 aa, ARTIFICIAL SEQUENCE
  Synthetic Construct
GKIITK

SEQ ID NO: 13528 - protein, 6 aa, ARTIFICIAL SEQUENCE
  Synthetic Construct
GKIIYK

SEQ ID NO: 13529 - protein, 6 aa, ARTIFICIAL SEQUENCE
  Synthetic Construct
GKILAK

SEQ ID NO: 13530 - protein, 6 aa, ARTIFICIAL SEQUENCE
  Synthetic Construct
GKILDK

SEQ ID NO: 13531 - protein, 6 aa, ARTIFICIAL SEQUENCE
  Synthetic Construct
GKILEK

SEQ ID NO: 13532 - protein, 6 aa, ARTIFICIAL SEQUENCE
  Synthetic Construct
GKILFK

SEQ ID NO: 13533 - protein, 6 aa, ARTIFICIAL SEQUENCE
  Synthetic Construct
GKILGK

SEQ ID NO: 13534 - protein, 6 aa, ARTIFICIAL SEQUENCE
  Synthetic Construct
GKILHK

SEQ ID NO: 13535 - protein, 6 aa, ARTIFICIAL SEQUENCE
  Synthetic Construct
GKILIK

SEQ ID NO: 13536 - protein, 6 aa, ARTIFICIAL SEQUENCE
  Synthetic Construct
GKILLK

SEQ ID NO: 13537 - protein, 6 aa, ARTIFICIAL SEQUENCE
  Synthetic Construct
GKILNK

SEQ ID NO: 13538 - protein, 6 aa, ARTIFICIAL SEQUENCE
  Synthetic Construct
GKILQK

SEQ ID NO: 13539 - protein, 6 aa, ARTIFICIAL SEQUENCE
  Synthetic Construct
GKILRK

SEQ ID NO: 13540 - protein, 6 aa, ARTIFICIAL SEQUENCE
  Synthetic Construct
GKILSK

SEQ ID NO: 13541 - protein, 6 aa, ARTIFICIAL SEQUENCE
  Synthetic Construct
GKILTK

SEQ ID NO: 13542 - protein, 6 aa, ARTIFICIAL SEQUENCE
  Synthetic Construct
GKILYK

SEQ ID NO: 13543 - protein, 6 aa, ARTIFICIAL SEQUENCE
  Synthetic Construct
GKINAK

SEQ ID NO: 13544 - protein, 6 aa, ARTIFICIAL SEQUENCE
  Synthetic Construct
GKINDK

SEQ ID NO: 13545 - protein, 6 aa, ARTIFICIAL SEQUENCE
  Synthetic Construct
GKINEK

SEQ ID NO: 13546 - protein, 6 aa, ARTIFICIAL SEQUENCE
  Synthetic Construct
GKINFK

SEQ ID NO: 13547 - protein, 6 aa, ARTIFICIAL SEQUENCE
  Synthetic Construct
GKINGK

SEQ ID NO: 13548 - protein, 6 aa, ARTIFICIAL SEQUENCE
  Synthetic Construct
GKINHK

SEQ ID NO: 13549 - protein, 6 aa, ARTIFICIAL SEQUENCE
  Synthetic Construct
GKINIK

SEQ ID NO: 13550 - protein, 6 aa, ARTIFICIAL SEQUENCE
  Synthetic Construct
GKINLK

SEQ ID NO: 13551 - protein, 6 aa, ARTIFICIAL SEQUENCE
  Synthetic Construct
GKINNK

SEQ ID NO: 13552 - protein, 6 aa, ARTIFICIAL SEQUENCE
  Synthetic Construct
GKINQK

SEQ ID NO: 13553 - protein, 6 aa, ARTIFICIAL SEQUENCE
  Synthetic Construct
GKINRK

SEQ ID NO: 13554 - protein, 6 aa, ARTIFICIAL SEQUENCE
  Synthetic Construct
GKINSK

SEQ ID NO: 13555 - protein, 6 aa, ARTIFICIAL SEQUENCE
  Synthetic Construct
GKINTK

SEQ ID NO: 13556 - protein, 6 aa, ARTIFICIAL SEQUENCE
  Synthetic Construct
GKINYK

SEQ ID NO: 13557 - protein, 6 aa, ARTIFICIAL SEQUENCE
  Synthetic Construct
GKIQAK

SEQ ID NO: 13558 - protein, 6 aa, ARTIFICIAL SEQUENCE
  Synthetic Construct
GKIQDK

SEQ ID NO: 13559 - protein, 6 aa, ARTIFICIAL SEQUENCE
  Synthetic Construct
GKIQEK

SEQ ID NO: 13560 - protein, 6 aa, ARTIFICIAL SEQUENCE
  Synthetic Construct
GKIQFK

SEQ ID NO: 13561 - protein, 6 aa, ARTIFICIAL SEQUENCE
  Synthetic Construct
GKIQGK

SEQ ID NO: 13562 - protein, 6 aa, ARTIFICIAL SEQUENCE
  Synthetic Construct
GKIQHK

SEQ ID NO: 13563 - protein, 6 aa, ARTIFICIAL SEQUENCE
  Synthetic Construct
GKIQIK

SEQ ID NO: 13564 - protein, 6 aa, ARTIFICIAL SEQUENCE
  Synthetic Construct
GKIQLK

SEQ ID NO: 13565 - protein, 6 aa, ARTIFICIAL SEQUENCE
  Synthetic Construct
GKIQNK

SEQ ID NO: 13566 - protein, 6 aa, ARTIFICIAL SEQUENCE
  Synthetic Construct
GKIQQK

SEQ ID NO: 13567 - protein, 6 aa, ARTIFICIAL SEQUENCE
  Synthetic Construct
GKIQRK

SEQ ID NO: 13568 - protein, 6 aa, ARTIFICIAL SEQUENCE
  Synthetic Construct
GKIQSK

SEQ ID NO: 13569 - protein, 6 aa, ARTIFICIAL SEQUENCE
  Synthetic Construct
GKIQTK

SEQ ID NO: 13570 - protein, 6 aa, ARTIFICIAL SEQUENCE
  Synthetic Construct
GKIQYK

SEQ ID NO: 13571 - protein, 6 aa, ARTIFICIAL SEQUENCE
  Synthetic Construct
GKIRAK

SEQ ID NO: 13572 - protein, 6 aa, ARTIFICIAL SEQUENCE
  Synthetic Construct
GKIRDK

SEQ ID NO: 13573 - protein, 6 aa, ARTIFICIAL SEQUENCE
  Synthetic Construct
GKIREK

SEQ ID NO: 13574 - protein, 6 aa, ARTIFICIAL SEQUENCE
  Synthetic Construct
GKIRFK

SEQ ID NO: 13575 - protein, 6 aa, ARTIFICIAL SEQUENCE
  Synthetic Construct
GKIRGK

SEQ ID NO: 13576 - protein, 6 aa, ARTIFICIAL SEQUENCE
  Synthetic Construct
GKIRHK

SEQ ID NO: 13577 - protein, 6 aa, ARTIFICIAL SEQUENCE
  Synthetic Construct
GKIRIK

SEQ ID NO: 13578 - protein, 6 aa, ARTIFICIAL SEQUENCE
  Synthetic Construct
GKIRLK

SEQ ID NO: 13579 - protein, 6 aa, ARTIFICIAL SEQUENCE
  Synthetic Construct
GKIRNK

SEQ ID NO: 13580 - protein, 6 aa, ARTIFICIAL SEQUENCE
  Synthetic Construct
GKIRQK

SEQ ID NO: 13581 - protein, 6 aa, ARTIFICIAL SEQUENCE
  Synthetic Construct
GKIRRK

SEQ ID NO: 13582 - protein, 6 aa, ARTIFICIAL SEQUENCE
  Synthetic Construct
GKIRSK

SEQ ID NO: 13583 - protein, 6 aa, ARTIFICIAL SEQUENCE
  Synthetic Construct
GKIRTK

SEQ ID NO: 13584 - protein, 6 aa, ARTIFICIAL SEQUENCE
  Synthetic Construct
GKIRYK

SEQ ID NO: 13585 - protein, 6 aa, ARTIFICIAL SEQUENCE
  Synthetic Construct
GKISAK

SEQ ID NO: 13586 - protein, 6 aa, ARTIFICIAL SEQUENCE
  Synthetic Construct
GKISDK

SEQ ID NO: 13587 - protein, 6 aa, ARTIFICIAL SEQUENCE
  Synthetic Construct
GKISEK

SEQ ID NO: 13588 - protein, 6 aa, ARTIFICIAL SEQUENCE
  Synthetic Construct
GKISFK

SEQ ID NO: 13589 - protein, 6 aa, ARTIFICIAL SEQUENCE
  Synthetic Construct
GKISGK

SEQ ID NO: 13590 - protein, 6 aa, ARTIFICIAL SEQUENCE
  Synthetic Construct
GKISHK

SEQ ID NO: 13591 - protein, 6 aa, ARTIFICIAL SEQUENCE
  Synthetic Construct
GKISIK

SEQ ID NO: 13592 - protein, 6 aa, ARTIFICIAL SEQUENCE
  Synthetic Construct
GKISLK

SEQ ID NO: 13593 - protein, 6 aa, ARTIFICIAL SEQUENCE
  Synthetic Construct
GKISNK

SEQ ID NO: 13594 - protein, 6 aa, ARTIFICIAL SEQUENCE
  Synthetic Construct
GKISQK

SEQ ID NO: 13595 - protein, 6 aa, ARTIFICIAL SEQUENCE
  Synthetic Construct
GKISRK

SEQ ID NO: 13596 - protein, 6 aa, ARTIFICIAL SEQUENCE
  Synthetic Construct
GKISSK

SEQ ID NO: 13597 - protein, 6 aa, ARTIFICIAL SEQUENCE
  Synthetic Construct
GKISTK

SEQ ID NO: 13598 - protein, 6 aa, ARTIFICIAL SEQUENCE
  Synthetic Construct
GKISYK

SEQ ID NO: 13599 - protein, 6 aa, ARTIFICIAL SEQUENCE
  Synthetic Construct
GKITAK

SEQ ID NO: 13600 - protein, 6 aa, ARTIFICIAL SEQUENCE
  Synthetic Construct
GKITDK

SEQ ID NO: 13601 - protein, 6 aa, ARTIFICIAL SEQUENCE
  Synthetic Construct
GKITEK

SEQ ID NO: 13602 - protein, 6 aa, ARTIFICIAL SEQUENCE
  Synthetic Construct
GKITFK

SEQ ID NO: 13603 - protein, 6 aa, ARTIFICIAL SEQUENCE
  Synthetic Construct
GKITGK

SEQ ID NO: 13604 - protein, 6 aa, ARTIFICIAL SEQUENCE
  Synthetic Construct
GKITHK

SEQ ID NO: 13605 - protein, 6 aa, ARTIFICIAL SEQUENCE
  Synthetic Construct
GKITIK

SEQ ID NO: 13606 - protein, 6 aa, ARTIFICIAL SEQUENCE
  Synthetic Construct
GKITLK

SEQ ID NO: 13607 - protein, 6 aa, ARTIFICIAL SEQUENCE
  Synthetic Construct
GKITNK

SEQ ID NO: 13608 - protein, 6 aa, ARTIFICIAL SEQUENCE
  Synthetic Construct
GKITQK

SEQ ID NO: 13609 - protein, 6 aa, ARTIFICIAL SEQUENCE
  Synthetic Construct
GKITRK

SEQ ID NO: 13610 - protein, 6 aa, ARTIFICIAL SEQUENCE
  Synthetic Construct
GKITSK

SEQ ID NO: 13611 - protein, 6 aa, ARTIFICIAL SEQUENCE
  Synthetic Construct
GKITTK

SEQ ID NO: 13612 - protein, 6 aa, ARTIFICIAL SEQUENCE
  Synthetic Construct
GKITYK

SEQ ID NO: 13613 - protein, 6 aa, ARTIFICIAL SEQUENCE
  Synthetic Construct
GKIYAK

SEQ ID NO: 13614 - protein, 6 aa, ARTIFICIAL SEQUENCE
  Synthetic Construct
GKIYDK

SEQ ID NO: 13615 - protein, 6 aa, ARTIFICIAL SEQUENCE
  Synthetic Construct
GKIYEK

SEQ ID NO: 13616 - protein, 6 aa, ARTIFICIAL SEQUENCE
  Synthetic Construct
GKIYFK

SEQ ID NO: 13617 - protein, 6 aa, ARTIFICIAL SEQUENCE
  Synthetic Construct
GKIYGK

SEQ ID NO: 13618 - protein, 6 aa, ARTIFICIAL SEQUENCE
  Synthetic Construct
GKIYHK

SEQ ID NO: 13619 - protein, 6 aa, ARTIFICIAL SEQUENCE
  Synthetic Construct
GKIYIK

SEQ ID NO: 13620 - protein, 6 aa, ARTIFICIAL SEQUENCE
  Synthetic Construct
GKIYLK

SEQ ID NO: 13621 - protein, 6 aa, ARTIFICIAL SEQUENCE
  Synthetic Construct
GKIYNK

SEQ ID NO: 13622 - protein, 6 aa, ARTIFICIAL SEQUENCE
  Synthetic Construct
GKIYQK

SEQ ID NO: 13623 - protein, 6 aa, ARTIFICIAL SEQUENCE
  Synthetic Construct
GKIYRK

SEQ ID NO: 13624 - protein, 6 aa, ARTIFICIAL SEQUENCE
  Synthetic Construct
GKIYSK

SEQ ID NO: 13625 - protein, 6 aa, ARTIFICIAL SEQUENCE
  Synthetic Construct
GKIYTK

SEQ ID NO: 13626 - protein, 6 aa, ARTIFICIAL SEQUENCE
  Synthetic Construct
GKIYYK

SEQ ID NO: 13627 - protein, 6 aa, ARTIFICIAL SEQUENCE
  Synthetic Construct
GKLAAK

SEQ ID NO: 13628 - protein, 6 aa, ARTIFICIAL SEQUENCE
  Synthetic Construct
GKLADK

SEQ ID NO: 13629 - protein, 6 aa, ARTIFICIAL SEQUENCE
  Synthetic Construct
GKLAEK

SEQ ID NO: 13630 - protein, 6 aa, ARTIFICIAL SEQUENCE
  Synthetic Construct
GKLAFK

SEQ ID NO: 13631 - protein, 6 aa, ARTIFICIAL SEQUENCE
  Synthetic Construct
GKLAGK

SEQ ID NO: 13632 - protein, 6 aa, ARTIFICIAL SEQUENCE
  Synthetic Construct
GKLAHK

SEQ ID NO: 13633 - protein, 6 aa, ARTIFICIAL SEQUENCE
  Synthetic Construct
GKLAIK

SEQ ID NO: 13634 - protein, 6 aa, ARTIFICIAL SEQUENCE
  Synthetic Construct
GKLALK

SEQ ID NO: 13635 - protein, 6 aa, ARTIFICIAL SEQUENCE
  Synthetic Construct
GKLANK

SEQ ID NO: 13636 - protein, 6 aa, ARTIFICIAL SEQUENCE
  Synthetic Construct
GKLAQK

SEQ ID NO: 13637 - protein, 6 aa, ARTIFICIAL SEQUENCE
  Synthetic Construct
GKLARK

SEQ ID NO: 13638 - protein, 6 aa, ARTIFICIAL SEQUENCE
  Synthetic Construct
GKLASK

SEQ ID NO: 13639 - protein, 6 aa, ARTIFICIAL SEQUENCE
  Synthetic Construct
GKLATK

SEQ ID NO: 13640 - protein, 6 aa, ARTIFICIAL SEQUENCE
  Synthetic Construct
GKLAYK

SEQ ID NO: 13641 - protein, 6 aa, ARTIFICIAL SEQUENCE
  Synthetic Construct
GKLDAK

SEQ ID NO: 13642 - protein, 6 aa, ARTIFICIAL SEQUENCE
  Synthetic Construct
GKLDDK

SEQ ID NO: 13643 - protein, 6 aa, ARTIFICIAL SEQUENCE
  Synthetic Construct
GKLDEK

SEQ ID NO: 13644 - protein, 6 aa, ARTIFICIAL SEQUENCE
  Synthetic Construct
GKLDFK

SEQ ID NO: 13645 - protein, 6 aa, ARTIFICIAL SEQUENCE
  Synthetic Construct
GKLDGK

SEQ ID NO: 13646 - protein, 6 aa, ARTIFICIAL SEQUENCE
  Synthetic Construct
GKLDHK

SEQ ID NO: 13647 - protein, 6 aa, ARTIFICIAL SEQUENCE
  Synthetic Construct
GKLDIK

SEQ ID NO: 13648 - protein, 6 aa, ARTIFICIAL SEQUENCE
  Synthetic Construct
GKLDLK

SEQ ID NO: 13649 - protein, 6 aa, ARTIFICIAL SEQUENCE
  Synthetic Construct
GKLDNK

SEQ ID NO: 13650 - protein, 6 aa, ARTIFICIAL SEQUENCE
  Synthetic Construct
GKLDQK

SEQ ID NO: 13651 - protein, 6 aa, ARTIFICIAL SEQUENCE
  Synthetic Construct
GKLDRK

SEQ ID NO: 13652 - protein, 6 aa, ARTIFICIAL SEQUENCE
  Synthetic Construct
GKLDSK

SEQ ID NO: 13653 - protein, 6 aa, ARTIFICIAL SEQUENCE
  Synthetic Construct
GKLDTK

SEQ ID NO: 13654 - protein, 6 aa, ARTIFICIAL SEQUENCE
  Synthetic Construct
GKLDYK

SEQ ID NO: 13655 - protein, 6 aa, ARTIFICIAL SEQUENCE
  Synthetic Construct
GKLEAK

SEQ ID NO: 13656 - protein, 6 aa, ARTIFICIAL SEQUENCE
  Synthetic Construct
GKLEDK

SEQ ID NO: 13657 - protein, 6 aa, ARTIFICIAL SEQUENCE
  Synthetic Construct
GKLEEK

SEQ ID NO: 13658 - protein, 6 aa, ARTIFICIAL SEQUENCE
  Synthetic Construct
GKLEFK

SEQ ID NO: 13659 - protein, 6 aa, ARTIFICIAL SEQUENCE
  Synthetic Construct
GKLEGK

SEQ ID NO: 13660 - protein, 6 aa, ARTIFICIAL SEQUENCE
  Synthetic Construct
GKLEHK

SEQ ID NO: 13661 - protein, 6 aa, ARTIFICIAL SEQUENCE
  Synthetic Construct
GKLEIK

SEQ ID NO: 13662 - protein, 6 aa, ARTIFICIAL SEQUENCE
  Synthetic Construct
GKLELK

SEQ ID NO: 13663 - protein, 6 aa, ARTIFICIAL SEQUENCE
  Synthetic Construct
GKLENK

SEQ ID NO: 13664 - protein, 6 aa, ARTIFICIAL SEQUENCE
  Synthetic Construct
GKLEQK

SEQ ID NO: 13665 - protein, 6 aa, ARTIFICIAL SEQUENCE
  Synthetic Construct
GKLERK

SEQ ID NO: 13666 - protein, 6 aa, ARTIFICIAL SEQUENCE
  Synthetic Construct
GKLESK

SEQ ID NO: 13667 - protein, 6 aa, ARTIFICIAL SEQUENCE
  Synthetic Construct
GKLETK

SEQ ID NO: 13668 - protein, 6 aa, ARTIFICIAL SEQUENCE
  Synthetic Construct
GKLEYK

SEQ ID NO: 13669 - protein, 6 aa, ARTIFICIAL SEQUENCE
  Synthetic Construct
GKLFAK

SEQ ID NO: 13670 - protein, 6 aa, ARTIFICIAL SEQUENCE
  Synthetic Construct
GKLFDK

SEQ ID NO: 13671 - protein, 6 aa, ARTIFICIAL SEQUENCE
  Synthetic Construct
GKLFEK

SEQ ID NO: 13672 - protein, 6 aa, ARTIFICIAL SEQUENCE
  Synthetic Construct
GKLFFK

SEQ ID NO: 13673 - protein, 6 aa, ARTIFICIAL SEQUENCE
  Synthetic Construct
GKLFGK

SEQ ID NO: 13674 - protein, 6 aa, ARTIFICIAL SEQUENCE
  Synthetic Construct
GKLFHK

SEQ ID NO: 13675 - protein, 6 aa, ARTIFICIAL SEQUENCE
  Synthetic Construct
GKLFIK

SEQ ID NO: 13676 - protein, 6 aa, ARTIFICIAL SEQUENCE
  Synthetic Construct
GKLFLK

SEQ ID NO: 13677 - protein, 6 aa, ARTIFICIAL SEQUENCE
  Synthetic Construct
GKLFNK

SEQ ID NO: 13678 - protein, 6 aa, ARTIFICIAL SEQUENCE
  Synthetic Construct
GKLFQK

SEQ ID NO: 13679 - protein, 6 aa, ARTIFICIAL SEQUENCE
  Synthetic Construct
GKLFRK

SEQ ID NO: 13680 - protein, 6 aa, ARTIFICIAL SEQUENCE
  Synthetic Construct
GKLFSK

SEQ ID NO: 13681 - protein, 6 aa, ARTIFICIAL SEQUENCE
  Synthetic Construct
GKLFTK

SEQ ID NO: 13682 - protein, 6 aa, ARTIFICIAL SEQUENCE
  Synthetic Construct
GKLFYK

SEQ ID NO: 13683 - protein, 6 aa, ARTIFICIAL SEQUENCE
  Synthetic Construct
GKLGAK

SEQ ID NO: 13684 - protein, 6 aa, ARTIFICIAL SEQUENCE
  Synthetic Construct
GKLGDK

SEQ ID NO: 13685 - protein, 6 aa, ARTIFICIAL SEQUENCE
  Synthetic Construct
GKLGEK

SEQ ID NO: 13686 - protein, 6 aa, ARTIFICIAL SEQUENCE
  Synthetic Construct
GKLGFK

SEQ ID NO: 13687 - protein, 6 aa, ARTIFICIAL SEQUENCE
  Synthetic Construct
GKLGGK

SEQ ID NO: 13688 - protein, 6 aa, ARTIFICIAL SEQUENCE
  Synthetic Construct
GKLGHK

SEQ ID NO: 13689 - protein, 6 aa, ARTIFICIAL SEQUENCE
  Synthetic Construct
GKLGIK

SEQ ID NO: 13690 - protein, 6 aa, ARTIFICIAL SEQUENCE
  Synthetic Construct
GKLGLK

SEQ ID NO: 13691 - protein, 6 aa, ARTIFICIAL SEQUENCE
  Synthetic Construct
GKLGNK

SEQ ID NO: 13692 - protein, 6 aa, ARTIFICIAL SEQUENCE
  Synthetic Construct
GKLGQK

SEQ ID NO: 13693 - protein, 6 aa, ARTIFICIAL SEQUENCE
  Synthetic Construct
GKLGRK

SEQ ID NO: 13694 - protein, 6 aa, ARTIFICIAL SEQUENCE
  Synthetic Construct
GKLGSK

SEQ ID NO: 13695 - protein, 6 aa, ARTIFICIAL SEQUENCE
  Synthetic Construct
GKLGTK

SEQ ID NO: 13696 - protein, 6 aa, ARTIFICIAL SEQUENCE
  Synthetic Construct
GKLGYK

SEQ ID NO: 13697 - protein, 6 aa, ARTIFICIAL SEQUENCE
  Synthetic Construct
GKLHAK

SEQ ID NO: 13698 - protein, 6 aa, ARTIFICIAL SEQUENCE
  Synthetic Construct
GKLHDK

SEQ ID NO: 13699 - protein, 6 aa, ARTIFICIAL SEQUENCE
  Synthetic Construct
GKLHEK

SEQ ID NO: 13700 - protein, 6 aa, ARTIFICIAL SEQUENCE
  Synthetic Construct
GKLHFK

SEQ ID NO: 13701 - protein, 6 aa, ARTIFICIAL SEQUENCE
  Synthetic Construct
GKLHGK

SEQ ID NO: 13702 - protein, 6 aa, ARTIFICIAL SEQUENCE
  Synthetic Construct
GKLHHK

SEQ ID NO: 13703 - protein, 6 aa, ARTIFICIAL SEQUENCE
  Synthetic Construct
GKLHIK

SEQ ID NO: 13704 - protein, 6 aa, ARTIFICIAL SEQUENCE
  Synthetic Construct
GKLHLK

SEQ ID NO: 13705 - protein, 6 aa, ARTIFICIAL SEQUENCE
  Synthetic Construct
GKLHNK

SEQ ID NO: 13706 - protein, 6 aa, ARTIFICIAL SEQUENCE
  Synthetic Construct
GKLHQK

SEQ ID NO: 13707 - protein, 6 aa, ARTIFICIAL SEQUENCE
  Synthetic Construct
GKLHRK

SEQ ID NO: 13708 - protein, 6 aa, ARTIFICIAL SEQUENCE
  Synthetic Construct
GKLHSK

SEQ ID NO: 13709 - protein, 6 aa, ARTIFICIAL SEQUENCE
  Synthetic Construct
GKLHTK

SEQ ID NO: 13710 - protein, 6 aa, ARTIFICIAL SEQUENCE
  Synthetic Construct
GKLHYK

SEQ ID NO: 13711 - protein, 6 aa, ARTIFICIAL SEQUENCE
  Synthetic Construct
GKLIAK

SEQ ID NO: 13712 - protein, 6 aa, ARTIFICIAL SEQUENCE
  Synthetic Construct
GKLIDK

SEQ ID NO: 13713 - protein, 6 aa, ARTIFICIAL SEQUENCE
  Synthetic Construct
GKLIEK

SEQ ID NO: 13714 - protein, 6 aa, ARTIFICIAL SEQUENCE
  Synthetic Construct
GKLIFK

SEQ ID NO: 13715 - protein, 6 aa, ARTIFICIAL SEQUENCE
  Synthetic Construct
GKLIGK

SEQ ID NO: 13716 - protein, 6 aa, ARTIFICIAL SEQUENCE
  Synthetic Construct
GKLIHK

SEQ ID NO: 13717 - protein, 6 aa, ARTIFICIAL SEQUENCE
  Synthetic Construct
GKLIIK

SEQ ID NO: 13718 - protein, 6 aa, ARTIFICIAL SEQUENCE
  Synthetic Construct
GKLILK

SEQ ID NO: 13719 - protein, 6 aa, ARTIFICIAL SEQUENCE
  Synthetic Construct
GKLINK

SEQ ID NO: 13720 - protein, 6 aa, ARTIFICIAL SEQUENCE
  Synthetic Construct
GKLIQK

SEQ ID NO: 13721 - protein, 6 aa, ARTIFICIAL SEQUENCE
  Synthetic Construct
GKLIRK

SEQ ID NO: 13722 - protein, 6 aa, ARTIFICIAL SEQUENCE
  Synthetic Construct
GKLISK

SEQ ID NO: 13723 - protein, 6 aa, ARTIFICIAL SEQUENCE
  Synthetic Construct
GKLITK

SEQ ID NO: 13724 - protein, 6 aa, ARTIFICIAL SEQUENCE
  Synthetic Construct
GKLIYK

SEQ ID NO: 13725 - protein, 6 aa, ARTIFICIAL SEQUENCE
  Synthetic Construct
GKLLAK

SEQ ID NO: 13726 - protein, 6 aa, ARTIFICIAL SEQUENCE
  Synthetic Construct
GKLLDK

SEQ ID NO: 13727 - protein, 6 aa, ARTIFICIAL SEQUENCE
  Synthetic Construct
GKLLEK

SEQ ID NO: 13728 - protein, 6 aa, ARTIFICIAL SEQUENCE
  Synthetic Construct
GKLLFK

SEQ ID NO: 13729 - protein, 6 aa, ARTIFICIAL SEQUENCE
  Synthetic Construct
GKLLGK

SEQ ID NO: 13730 - protein, 6 aa, ARTIFICIAL SEQUENCE
  Synthetic Construct
GKLLHK

SEQ ID NO: 13731 - protein, 6 aa, ARTIFICIAL SEQUENCE
  Synthetic Construct
GKLLIK

SEQ ID NO: 13732 - protein, 6 aa, ARTIFICIAL SEQUENCE
  Synthetic Construct
GKLLLK

SEQ ID NO: 13733 - protein, 6 aa, ARTIFICIAL SEQUENCE
  Synthetic Construct
GKLLNK

SEQ ID NO: 13734 - protein, 6 aa, ARTIFICIAL SEQUENCE
  Synthetic Construct
GKLLQK

SEQ ID NO: 13735 - protein, 6 aa, ARTIFICIAL SEQUENCE
  Synthetic Construct
GKLLRK

SEQ ID NO: 13736 - protein, 6 aa, ARTIFICIAL SEQUENCE
  Synthetic Construct
GKLLSK

SEQ ID NO: 13737 - protein, 6 aa, ARTIFICIAL SEQUENCE
  Synthetic Construct
GKLLTK

SEQ ID NO: 13738 - protein, 6 aa, ARTIFICIAL SEQUENCE
  Synthetic Construct
GKLLYK

SEQ ID NO: 13739 - protein, 6 aa, ARTIFICIAL SEQUENCE
  Synthetic Construct
GKLNAK

SEQ ID NO: 13740 - protein, 6 aa, ARTIFICIAL SEQUENCE
  Synthetic Construct
GKLNDK

SEQ ID NO: 13741 - protein, 6 aa, ARTIFICIAL SEQUENCE
  Synthetic Construct
GKLNEK

SEQ ID NO: 13742 - protein, 6 aa, ARTIFICIAL SEQUENCE
  Synthetic Construct
GKLNFK

SEQ ID NO: 13743 - protein, 6 aa, ARTIFICIAL SEQUENCE
  Synthetic Construct
GKLNGK

SEQ ID NO: 13744 - protein, 6 aa, ARTIFICIAL SEQUENCE
  Synthetic Construct
GKLNHK

SEQ ID NO: 13745 - protein, 6 aa, ARTIFICIAL SEQUENCE
  Synthetic Construct
GKLNIK

SEQ ID NO: 13746 - protein, 6 aa, ARTIFICIAL SEQUENCE
  Synthetic Construct
GKLNLK

SEQ ID NO: 13747 - protein, 6 aa, ARTIFICIAL SEQUENCE
  Synthetic Construct
GKLNNK

SEQ ID NO: 13748 - protein, 6 aa, ARTIFICIAL SEQUENCE
  Synthetic Construct
GKLNQK

SEQ ID NO: 13749 - protein, 6 aa, ARTIFICIAL SEQUENCE
  Synthetic Construct
GKLNRK

SEQ ID NO: 13750 - protein, 6 aa, ARTIFICIAL SEQUENCE
  Synthetic Construct
GKLNSK

SEQ ID NO: 13751 - protein, 6 aa, ARTIFICIAL SEQUENCE
  Synthetic Construct
GKLNTK

SEQ ID NO: 13752 - protein, 6 aa, ARTIFICIAL SEQUENCE
  Synthetic Construct
GKLNYK

SEQ ID NO: 13753 - protein, 6 aa, ARTIFICIAL SEQUENCE
  Synthetic Construct
GKLQAK

SEQ ID NO: 13754 - protein, 6 aa, ARTIFICIAL SEQUENCE
  Synthetic Construct
GKLQDK

SEQ ID NO: 13755 - protein, 6 aa, ARTIFICIAL SEQUENCE
  Synthetic Construct
GKLQEK

SEQ ID NO: 13756 - protein, 6 aa, ARTIFICIAL SEQUENCE
  Synthetic Construct
GKLQFK

SEQ ID NO: 13757 - protein, 6 aa, ARTIFICIAL SEQUENCE
  Synthetic Construct
GKLQGK

SEQ ID NO: 13758 - protein, 6 aa, ARTIFICIAL SEQUENCE
  Synthetic Construct
GKLQHK

SEQ ID NO: 13759 - protein, 6 aa, ARTIFICIAL SEQUENCE
  Synthetic Construct
GKLQIK

SEQ ID NO: 13760 - protein, 6 aa, ARTIFICIAL SEQUENCE
  Synthetic Construct
GKLQLK

SEQ ID NO: 13761 - protein, 6 aa, ARTIFICIAL SEQUENCE
  Synthetic Construct
GKLQNK

SEQ ID NO: 13762 - protein, 6 aa, ARTIFICIAL SEQUENCE
  Synthetic Construct
GKLQQK

SEQ ID NO: 13763 - protein, 6 aa, ARTIFICIAL SEQUENCE
  Synthetic Construct
GKLQRK

SEQ ID NO: 13764 - protein, 6 aa, ARTIFICIAL SEQUENCE
  Synthetic Construct
GKLQSK

SEQ ID NO: 13765 - protein, 6 aa, ARTIFICIAL SEQUENCE
  Synthetic Construct
GKLQTK

SEQ ID NO: 13766 - protein, 6 aa, ARTIFICIAL SEQUENCE
  Synthetic Construct
GKLQYK

SEQ ID NO: 13767 - protein, 6 aa, ARTIFICIAL SEQUENCE
  Synthetic Construct
GKLRAK

SEQ ID NO: 13768 - protein, 6 aa, ARTIFICIAL SEQUENCE
  Synthetic Construct
GKLRDK

SEQ ID NO: 13769 - protein, 6 aa, ARTIFICIAL SEQUENCE
  Synthetic Construct
GKLREK

SEQ ID NO: 13770 - protein, 6 aa, ARTIFICIAL SEQUENCE
  Synthetic Construct
GKLRFK

SEQ ID NO: 13771 - protein, 6 aa, ARTIFICIAL SEQUENCE
  Synthetic Construct
GKLRGK

SEQ ID NO: 13772 - protein, 6 aa, ARTIFICIAL SEQUENCE
  Synthetic Construct
GKLRHK

SEQ ID NO: 13773 - protein, 6 aa, ARTIFICIAL SEQUENCE
  Synthetic Construct
GKLRIK

SEQ ID NO: 13774 - protein, 6 aa, ARTIFICIAL SEQUENCE
  Synthetic Construct
GKLRLK

SEQ ID NO: 13775 - protein, 6 aa, ARTIFICIAL SEQUENCE
  Synthetic Construct
GKLRNK

SEQ ID NO: 13776 - protein, 6 aa, ARTIFICIAL SEQUENCE
  Synthetic Construct
GKLRQK

SEQ ID NO: 13777 - protein, 6 aa, ARTIFICIAL SEQUENCE
  Synthetic Construct
GKLRRK

SEQ ID NO: 13778 - protein, 6 aa, ARTIFICIAL SEQUENCE
  Synthetic Construct
GKLRSK

SEQ ID NO: 13779 - protein, 6 aa, ARTIFICIAL SEQUENCE
  Synthetic Construct
GKLRTK

SEQ ID NO: 13780 - protein, 6 aa, ARTIFICIAL SEQUENCE
  Synthetic Construct
GKLRYK

SEQ ID NO: 13781 - protein, 6 aa, ARTIFICIAL SEQUENCE
  Synthetic Construct
GKLSAK

SEQ ID NO: 13782 - protein, 6 aa, ARTIFICIAL SEQUENCE
  Synthetic Construct
GKLSDK

SEQ ID NO: 13783 - protein, 6 aa, ARTIFICIAL SEQUENCE
  Synthetic Construct
GKLSEK

SEQ ID NO: 13784 - protein, 6 aa, ARTIFICIAL SEQUENCE
  Synthetic Construct
GKLSFK

SEQ ID NO: 13785 - protein, 6 aa, ARTIFICIAL SEQUENCE
  Synthetic Construct
GKLSGK

SEQ ID NO: 13786 - protein, 6 aa, ARTIFICIAL SEQUENCE
  Synthetic Construct
GKLSHK

SEQ ID NO: 13787 - protein, 6 aa, ARTIFICIAL SEQUENCE
  Synthetic Construct
GKLSIK

SEQ ID NO: 13788 - protein, 6 aa, ARTIFICIAL SEQUENCE
  Synthetic Construct
GKLSLK

SEQ ID NO: 13789 - protein, 6 aa, ARTIFICIAL SEQUENCE
  Synthetic Construct
GKLSNK

SEQ ID NO: 13790 - protein, 6 aa, ARTIFICIAL SEQUENCE
  Synthetic Construct
GKLSQK

SEQ ID NO: 13791 - protein, 6 aa, ARTIFICIAL SEQUENCE
  Synthetic Construct
GKLSRK

SEQ ID NO: 13792 - protein, 6 aa, ARTIFICIAL SEQUENCE
  Synthetic Construct
GKLSSK

SEQ ID NO: 13793 - protein, 6 aa, ARTIFICIAL SEQUENCE
  Synthetic Construct
GKLSTK

SEQ ID NO: 13794 - protein, 6 aa, ARTIFICIAL SEQUENCE
  Synthetic Construct
GKLSYK

SEQ ID NO: 13795 - protein, 6 aa, ARTIFICIAL SEQUENCE
  Synthetic Construct
GKLTAK

SEQ ID NO: 13796 - protein, 6 aa, ARTIFICIAL SEQUENCE
  Synthetic Construct
GKLTDK

SEQ ID NO: 13797 - protein, 6 aa, ARTIFICIAL SEQUENCE
  Synthetic Construct
GKLTEK

SEQ ID NO: 13798 - protein, 6 aa, ARTIFICIAL SEQUENCE
  Synthetic Construct
GKLTFK

SEQ ID NO: 13799 - protein, 6 aa, ARTIFICIAL SEQUENCE
  Synthetic Construct
GKLTGK

SEQ ID NO: 13800 - protein, 6 aa, ARTIFICIAL SEQUENCE
  Synthetic Construct
GKLTHK

SEQ ID NO: 13801 - protein, 6 aa, ARTIFICIAL SEQUENCE
  Synthetic Construct
GKLTIK

SEQ ID NO: 13802 - protein, 6 aa, ARTIFICIAL SEQUENCE
  Synthetic Construct
GKLTLK

SEQ ID NO: 13803 - protein, 6 aa, ARTIFICIAL SEQUENCE
  Synthetic Construct
GKLTNK

SEQ ID NO: 13804 - protein, 6 aa, ARTIFICIAL SEQUENCE
  Synthetic Construct
GKLTQK

SEQ ID NO: 13805 - protein, 6 aa, ARTIFICIAL SEQUENCE
  Synthetic Construct
GKLTRK

SEQ ID NO: 13806 - protein, 6 aa, ARTIFICIAL SEQUENCE
  Synthetic Construct
GKLTSK

SEQ ID NO: 13807 - protein, 6 aa, ARTIFICIAL SEQUENCE
  Synthetic Construct
GKLTTK

SEQ ID NO: 13808 - protein, 6 aa, ARTIFICIAL SEQUENCE
  Synthetic Construct
GKLTYK

SEQ ID NO: 13809 - protein, 6 aa, ARTIFICIAL SEQUENCE
  Synthetic Construct
GKLYAK

SEQ ID NO: 13810 - protein, 6 aa, ARTIFICIAL SEQUENCE
  Synthetic Construct
GKLYDK

SEQ ID NO: 13811 - protein, 6 aa, ARTIFICIAL SEQUENCE
  Synthetic Construct
GKLYEK

SEQ ID NO: 13812 - protein, 6 aa, ARTIFICIAL SEQUENCE
  Synthetic Construct
GKLYFK

SEQ ID NO: 13813 - protein, 6 aa, ARTIFICIAL SEQUENCE
  Synthetic Construct
GKLYGK

SEQ ID NO: 13814 - protein, 6 aa, ARTIFICIAL SEQUENCE
  Synthetic Construct
GKLYHK

SEQ ID NO: 13815 - protein, 6 aa, ARTIFICIAL SEQUENCE
  Synthetic Construct
GKLYIK

SEQ ID NO: 13816 - protein, 6 aa, ARTIFICIAL SEQUENCE
  Synthetic Construct
GKLYLK

SEQ ID NO: 13817 - protein, 6 aa, ARTIFICIAL SEQUENCE
  Synthetic Construct
GKLYNK

SEQ ID NO: 13818 - protein, 6 aa, ARTIFICIAL SEQUENCE
  Synthetic Construct
GKLYQK

SEQ ID NO: 13819 - protein, 6 aa, ARTIFICIAL SEQUENCE
  Synthetic Construct
GKLYRK

SEQ ID NO: 13820 - protein, 6 aa, ARTIFICIAL SEQUENCE
  Synthetic Construct
GKLYSK

SEQ ID NO: 13821 - protein, 6 aa, ARTIFICIAL SEQUENCE
  Synthetic Construct
GKLYTK

SEQ ID NO: 13822 - protein, 6 aa, ARTIFICIAL SEQUENCE
  Synthetic Construct
GKLYYK

SEQ ID NO: 13823 - protein, 6 aa, ARTIFICIAL SEQUENCE
  Synthetic Construct
GKNAAK

SEQ ID NO: 13824 - protein, 6 aa, ARTIFICIAL SEQUENCE
  Synthetic Construct
GKNADK

SEQ ID NO: 13825 - protein, 6 aa, ARTIFICIAL SEQUENCE
  Synthetic Construct
GKNAEK

SEQ ID NO: 13826 - protein, 6 aa, ARTIFICIAL SEQUENCE
  Synthetic Construct
GKNAFK

SEQ ID NO: 13827 - protein, 6 aa, ARTIFICIAL SEQUENCE
  Synthetic Construct
GKNAGK

SEQ ID NO: 13828 - protein, 6 aa, ARTIFICIAL SEQUENCE
  Synthetic Construct
GKNAHK

SEQ ID NO: 13829 - protein, 6 aa, ARTIFICIAL SEQUENCE
  Synthetic Construct
GKNAIK

SEQ ID NO: 13830 - protein, 6 aa, ARTIFICIAL SEQUENCE
  Synthetic Construct
GKNALK

SEQ ID NO: 13831 - protein, 6 aa, ARTIFICIAL SEQUENCE
  Synthetic Construct
GKNANK

SEQ ID NO: 13832 - protein, 6 aa, ARTIFICIAL SEQUENCE
  Synthetic Construct
GKNAQK

SEQ ID NO: 13833 - protein, 6 aa, ARTIFICIAL SEQUENCE
  Synthetic Construct
GKNARK

SEQ ID NO: 13834 - protein, 6 aa, ARTIFICIAL SEQUENCE
  Synthetic Construct
GKNASK

SEQ ID NO: 13835 - protein, 6 aa, ARTIFICIAL SEQUENCE
  Synthetic Construct
GKNATK

SEQ ID NO: 13836 - protein, 6 aa, ARTIFICIAL SEQUENCE
  Synthetic Construct
GKNAYK

SEQ ID NO: 13837 - protein, 6 aa, ARTIFICIAL SEQUENCE
  Synthetic Construct
GKNDAK

SEQ ID NO: 13838 - protein, 6 aa, ARTIFICIAL SEQUENCE
  Synthetic Construct
GKNDDK

SEQ ID NO: 13839 - protein, 6 aa, ARTIFICIAL SEQUENCE
  Synthetic Construct
GKNDEK

SEQ ID NO: 13840 - protein, 6 aa, ARTIFICIAL SEQUENCE
  Synthetic Construct
GKNDFK

SEQ ID NO: 13841 - protein, 6 aa, ARTIFICIAL SEQUENCE
  Synthetic Construct
GKNDGK

SEQ ID NO: 13842 - protein, 6 aa, ARTIFICIAL SEQUENCE
  Synthetic Construct
GKNDHK

SEQ ID NO: 13843 - protein, 6 aa, ARTIFICIAL SEQUENCE
  Synthetic Construct
GKNDIK

SEQ ID NO: 13844 - protein, 6 aa, ARTIFICIAL SEQUENCE
  Synthetic Construct
GKNDLK

SEQ ID NO: 13845 - protein, 6 aa, ARTIFICIAL SEQUENCE
  Synthetic Construct
GKNDNK

SEQ ID NO: 13846 - protein, 6 aa, ARTIFICIAL SEQUENCE
  Synthetic Construct
GKNDQK

SEQ ID NO: 13847 - protein, 6 aa, ARTIFICIAL SEQUENCE
  Synthetic Construct
GKNDRK

SEQ ID NO: 13848 - protein, 6 aa, ARTIFICIAL SEQUENCE
  Synthetic Construct
GKNDSK

SEQ ID NO: 13849 - protein, 6 aa, ARTIFICIAL SEQUENCE
  Synthetic Construct
GKNDTK

SEQ ID NO: 13850 - protein, 6 aa, ARTIFICIAL SEQUENCE
  Synthetic Construct
GKNDYK

SEQ ID NO: 13851 - protein, 6 aa, ARTIFICIAL SEQUENCE
  Synthetic Construct
GKNEAK

SEQ ID NO: 13852 - protein, 6 aa, ARTIFICIAL SEQUENCE
  Synthetic Construct
GKNEDK

SEQ ID NO: 13853 - protein, 6 aa, ARTIFICIAL SEQUENCE
  Synthetic Construct
GKNEEK

SEQ ID NO: 13854 - protein, 6 aa, ARTIFICIAL SEQUENCE
  Synthetic Construct
GKNEFK

SEQ ID NO: 13855 - protein, 6 aa, ARTIFICIAL SEQUENCE
  Synthetic Construct
GKNEGK

SEQ ID NO: 13856 - protein, 6 aa, ARTIFICIAL SEQUENCE
  Synthetic Construct
GKNEHK

SEQ ID NO: 13857 - protein, 6 aa, ARTIFICIAL SEQUENCE
  Synthetic Construct
GKNEIK

SEQ ID NO: 13858 - protein, 6 aa, ARTIFICIAL SEQUENCE
  Synthetic Construct
GKNELK

SEQ ID NO: 13859 - protein, 6 aa, ARTIFICIAL SEQUENCE
  Synthetic Construct
GKNENK

SEQ ID NO: 13860 - protein, 6 aa, ARTIFICIAL SEQUENCE
  Synthetic Construct
GKNEQK

SEQ ID NO: 13861 - protein, 6 aa, ARTIFICIAL SEQUENCE
  Synthetic Construct
GKNERK

SEQ ID NO: 13862 - protein, 6 aa, ARTIFICIAL SEQUENCE
  Synthetic Construct
GKNESK

SEQ ID NO: 13863 - protein, 6 aa, ARTIFICIAL SEQUENCE
  Synthetic Construct
GKNETK

SEQ ID NO: 13864 - protein, 6 aa, ARTIFICIAL SEQUENCE
  Synthetic Construct
GKNEYK

SEQ ID NO: 13865 - protein, 6 aa, ARTIFICIAL SEQUENCE
  Synthetic Construct
GKNFAK

SEQ ID NO: 13866 - protein, 6 aa, ARTIFICIAL SEQUENCE
  Synthetic Construct
GKNFDK

SEQ ID NO: 13867 - protein, 6 aa, ARTIFICIAL SEQUENCE
  Synthetic Construct
GKNFEK

SEQ ID NO: 13868 - protein, 6 aa, ARTIFICIAL SEQUENCE
  Synthetic Construct
GKNFFK

SEQ ID NO: 13869 - protein, 6 aa, ARTIFICIAL SEQUENCE
  Synthetic Construct
GKNFGK

SEQ ID NO: 13870 - protein, 6 aa, ARTIFICIAL SEQUENCE
  Synthetic Construct
GKNFHK

SEQ ID NO: 13871 - protein, 6 aa, ARTIFICIAL SEQUENCE
  Synthetic Construct
GKNFIK

SEQ ID NO: 13872 - protein, 6 aa, ARTIFICIAL SEQUENCE
  Synthetic Construct
GKNFLK

SEQ ID NO: 13873 - protein, 6 aa, ARTIFICIAL SEQUENCE
  Synthetic Construct
GKNFNK

SEQ ID NO: 13874 - protein, 6 aa, ARTIFICIAL SEQUENCE
  Synthetic Construct
GKNFQK

SEQ ID NO: 13875 - protein, 6 aa, ARTIFICIAL SEQUENCE
  Synthetic Construct
GKNFRK

SEQ ID NO: 13876 - protein, 6 aa, ARTIFICIAL SEQUENCE
  Synthetic Construct
GKNFSK

SEQ ID NO: 13877 - protein, 6 aa, ARTIFICIAL SEQUENCE
  Synthetic Construct
GKNFTK

SEQ ID NO: 13878 - protein, 6 aa, ARTIFICIAL SEQUENCE
  Synthetic Construct
GKNFYK

SEQ ID NO: 13879 - protein, 6 aa, ARTIFICIAL SEQUENCE
  Synthetic Construct
GKNGAK

SEQ ID NO: 13880 - protein, 6 aa, ARTIFICIAL SEQUENCE
  Synthetic Construct
GKNGDK

SEQ ID NO: 13881 - protein, 6 aa, ARTIFICIAL SEQUENCE
  Synthetic Construct
GKNGEK

SEQ ID NO: 13882 - protein, 6 aa, ARTIFICIAL SEQUENCE
  Synthetic Construct
GKNGFK

SEQ ID NO: 13883 - protein, 6 aa, ARTIFICIAL SEQUENCE
  Synthetic Construct
GKNGGK

SEQ ID NO: 13884 - protein, 6 aa, ARTIFICIAL SEQUENCE
  Synthetic Construct
GKNGHK

SEQ ID NO: 13885 - protein, 6 aa, ARTIFICIAL SEQUENCE
  Synthetic Construct
GKNGIK

SEQ ID NO: 13886 - protein, 6 aa, ARTIFICIAL SEQUENCE
  Synthetic Construct
GKNGLK

SEQ ID NO: 13887 - protein, 6 aa, ARTIFICIAL SEQUENCE
  Synthetic Construct
GKNGNK

SEQ ID NO: 13888 - protein, 6 aa, ARTIFICIAL SEQUENCE
  Synthetic Construct
GKNGQK

SEQ ID NO: 13889 - protein, 6 aa, ARTIFICIAL SEQUENCE
  Synthetic Construct
GKNGRK

SEQ ID NO: 13890 - protein, 6 aa, ARTIFICIAL SEQUENCE
  Synthetic Construct
GKNGSK

SEQ ID NO: 13891 - protein, 6 aa, ARTIFICIAL SEQUENCE
  Synthetic Construct
GKNGTK

SEQ ID NO: 13892 - protein, 6 aa, ARTIFICIAL SEQUENCE
  Synthetic Construct
GKNGYK

SEQ ID NO: 13893 - protein, 6 aa, ARTIFICIAL SEQUENCE
  Synthetic Construct
GKNHAK

SEQ ID NO: 13894 - protein, 6 aa, ARTIFICIAL SEQUENCE
  Synthetic Construct
GKNHDK

SEQ ID NO: 13895 - protein, 6 aa, ARTIFICIAL SEQUENCE
  Synthetic Construct
GKNHEK

SEQ ID NO: 13896 - protein, 6 aa, ARTIFICIAL SEQUENCE
  Synthetic Construct
GKNHFK

SEQ ID NO: 13897 - protein, 6 aa, ARTIFICIAL SEQUENCE
  Synthetic Construct
GKNHGK

SEQ ID NO: 13898 - protein, 6 aa, ARTIFICIAL SEQUENCE
  Synthetic Construct
GKNHHK

SEQ ID NO: 13899 - protein, 6 aa, ARTIFICIAL SEQUENCE
  Synthetic Construct
GKNHIK

SEQ ID NO: 13900 - protein, 6 aa, ARTIFICIAL SEQUENCE
  Synthetic Construct
GKNHLK

SEQ ID NO: 13901 - protein, 6 aa, ARTIFICIAL SEQUENCE
  Synthetic Construct
GKNHNK

SEQ ID NO: 13902 - protein, 6 aa, ARTIFICIAL SEQUENCE
  Synthetic Construct
GKNHQK

SEQ ID NO: 13903 - protein, 6 aa, ARTIFICIAL SEQUENCE
  Synthetic Construct
GKNHRK

SEQ ID NO: 13904 - protein, 6 aa, ARTIFICIAL SEQUENCE
  Synthetic Construct
GKNHSK

SEQ ID NO: 13905 - protein, 6 aa, ARTIFICIAL SEQUENCE
  Synthetic Construct
GKNHTK

SEQ ID NO: 13906 - protein, 6 aa, ARTIFICIAL SEQUENCE
  Synthetic Construct
GKNHYK

SEQ ID NO: 13907 - protein, 6 aa, ARTIFICIAL SEQUENCE
  Synthetic Construct
GKNIAK

SEQ ID NO: 13908 - protein, 6 aa, ARTIFICIAL SEQUENCE
  Synthetic Construct
GKNIDK

SEQ ID NO: 13909 - protein, 6 aa, ARTIFICIAL SEQUENCE
  Synthetic Construct
GKNIEK

SEQ ID NO: 13910 - protein, 6 aa, ARTIFICIAL SEQUENCE
  Synthetic Construct
GKNIFK

SEQ ID NO: 13911 - protein, 6 aa, ARTIFICIAL SEQUENCE
  Synthetic Construct
GKNIGK

SEQ ID NO: 13912 - protein, 6 aa, ARTIFICIAL SEQUENCE
  Synthetic Construct
GKNIHK

SEQ ID NO: 13913 - protein, 6 aa, ARTIFICIAL SEQUENCE
  Synthetic Construct
GKNIIK

SEQ ID NO: 13914 - protein, 6 aa, ARTIFICIAL SEQUENCE
  Synthetic Construct
GKNILK

SEQ ID NO: 13915 - protein, 6 aa, ARTIFICIAL SEQUENCE
  Synthetic Construct
GKNINK

SEQ ID NO: 13916 - protein, 6 aa, ARTIFICIAL SEQUENCE
  Synthetic Construct
GKNIQK

SEQ ID NO: 13917 - protein, 6 aa, ARTIFICIAL SEQUENCE
  Synthetic Construct
GKNIRK

SEQ ID NO: 13918 - protein, 6 aa, ARTIFICIAL SEQUENCE
  Synthetic Construct
GKNISK

SEQ ID NO: 13919 - protein, 6 aa, ARTIFICIAL SEQUENCE
  Synthetic Construct
GKNITK

SEQ ID NO: 13920 - protein, 6 aa, ARTIFICIAL SEQUENCE
  Synthetic Construct
GKNIYK

SEQ ID NO: 13921 - protein, 6 aa, ARTIFICIAL SEQUENCE
  Synthetic Construct
GKNLAK

SEQ ID NO: 13922 - protein, 6 aa, ARTIFICIAL SEQUENCE
  Synthetic Construct
GKNLDK

SEQ ID NO: 13923 - protein, 6 aa, ARTIFICIAL SEQUENCE
  Synthetic Construct
GKNLEK

SEQ ID NO: 13924 - protein, 6 aa, ARTIFICIAL SEQUENCE
  Synthetic Construct
GKNLFK

SEQ ID NO: 13925 - protein, 6 aa, ARTIFICIAL SEQUENCE
  Synthetic Construct
GKNLGK

SEQ ID NO: 13926 - protein, 6 aa, ARTIFICIAL SEQUENCE
  Synthetic Construct
GKNLHK

SEQ ID NO: 13927 - protein, 6 aa, ARTIFICIAL SEQUENCE
  Synthetic Construct
GKNLIK

SEQ ID NO: 13928 - protein, 6 aa, ARTIFICIAL SEQUENCE
  Synthetic Construct
GKNLLK

SEQ ID NO: 13929 - protein, 6 aa, ARTIFICIAL SEQUENCE
  Synthetic Construct
GKNLNK

SEQ ID NO: 13930 - protein, 6 aa, ARTIFICIAL SEQUENCE
  Synthetic Construct
GKNLQK

SEQ ID NO: 13931 - protein, 6 aa, ARTIFICIAL SEQUENCE
  Synthetic Construct
GKNLRK

SEQ ID NO: 13932 - protein, 6 aa, ARTIFICIAL SEQUENCE
  Synthetic Construct
GKNLSK

SEQ ID NO: 13933 - protein, 6 aa, ARTIFICIAL SEQUENCE
  Synthetic Construct
GKNLTK

SEQ ID NO: 13934 - protein, 6 aa, ARTIFICIAL SEQUENCE
  Synthetic Construct
GKNLYK

SEQ ID NO: 13935 - protein, 6 aa, ARTIFICIAL SEQUENCE
  Synthetic Construct
GKNNAK

SEQ ID NO: 13936 - protein, 6 aa, ARTIFICIAL SEQUENCE
  Synthetic Construct
GKNNDK

SEQ ID NO: 13937 - protein, 6 aa, ARTIFICIAL SEQUENCE
  Synthetic Construct
GKNNEK

SEQ ID NO: 13938 - protein, 6 aa, ARTIFICIAL SEQUENCE
  Synthetic Construct
GKNNFK

SEQ ID NO: 13939 - protein, 6 aa, ARTIFICIAL SEQUENCE
  Synthetic Construct
GKNNGK

SEQ ID NO: 13940 - protein, 6 aa, ARTIFICIAL SEQUENCE
  Synthetic Construct
GKNNHK

SEQ ID NO: 13941 - protein, 6 aa, ARTIFICIAL SEQUENCE
  Synthetic Construct
GKNNIK

SEQ ID NO: 13942 - protein, 6 aa, ARTIFICIAL SEQUENCE
  Synthetic Construct
GKNNLK

SEQ ID NO: 13943 - protein, 6 aa, ARTIFICIAL SEQUENCE
  Synthetic Construct
GKNNNK

SEQ ID NO: 13944 - protein, 6 aa, ARTIFICIAL SEQUENCE
  Synthetic Construct
GKNNQK

SEQ ID NO: 13945 - protein, 6 aa, ARTIFICIAL SEQUENCE
  Synthetic Construct
GKNNRK

SEQ ID NO: 13946 - protein, 6 aa, ARTIFICIAL SEQUENCE
  Synthetic Construct
GKNNSK

SEQ ID NO: 13947 - protein, 6 aa, ARTIFICIAL SEQUENCE
  Synthetic Construct
GKNNTK

SEQ ID NO: 13948 - protein, 6 aa, ARTIFICIAL SEQUENCE
  Synthetic Construct
GKNNYK

SEQ ID NO: 13949 - protein, 6 aa, ARTIFICIAL SEQUENCE
  Synthetic Construct
GKNQAK

SEQ ID NO: 13950 - protein, 6 aa, ARTIFICIAL SEQUENCE
  Synthetic Construct
GKNQDK

SEQ ID NO: 13951 - protein, 6 aa, ARTIFICIAL SEQUENCE
  Synthetic Construct
GKNQEK

SEQ ID NO: 13952 - protein, 6 aa, ARTIFICIAL SEQUENCE
  Synthetic Construct
GKNQFK

SEQ ID NO: 13953 - protein, 6 aa, ARTIFICIAL SEQUENCE
  Synthetic Construct
GKNQGK

SEQ ID NO: 13954 - protein, 6 aa, ARTIFICIAL SEQUENCE
  Synthetic Construct
GKNQHK

SEQ ID NO: 13955 - protein, 6 aa, ARTIFICIAL SEQUENCE
  Synthetic Construct
GKNQIK

SEQ ID NO: 13956 - protein, 6 aa, ARTIFICIAL SEQUENCE
  Synthetic Construct
GKNQLK

SEQ ID NO: 13957 - protein, 6 aa, ARTIFICIAL SEQUENCE
  Synthetic Construct
GKNQNK

SEQ ID NO: 13958 - protein, 6 aa, ARTIFICIAL SEQUENCE
  Synthetic Construct
GKNQQK

SEQ ID NO: 13959 - protein, 6 aa, ARTIFICIAL SEQUENCE
  Synthetic Construct
GKNQRK

SEQ ID NO: 13960 - protein, 6 aa, ARTIFICIAL SEQUENCE
  Synthetic Construct
GKNQSK

SEQ ID NO: 13961 - protein, 6 aa, ARTIFICIAL SEQUENCE
  Synthetic Construct
GKNQTK

SEQ ID NO: 13962 - protein, 6 aa, ARTIFICIAL SEQUENCE
  Synthetic Construct
GKNQYK

SEQ ID NO: 13963 - protein, 6 aa, ARTIFICIAL SEQUENCE
  Synthetic Construct
GKNRAK

SEQ ID NO: 13964 - protein, 6 aa, ARTIFICIAL SEQUENCE
  Synthetic Construct
GKNRDK

SEQ ID NO: 13965 - protein, 6 aa, ARTIFICIAL SEQUENCE
  Synthetic Construct
GKNREK

SEQ ID NO: 13966 - protein, 6 aa, ARTIFICIAL SEQUENCE
  Synthetic Construct
GKNRFK

SEQ ID NO: 13967 - protein, 6 aa, ARTIFICIAL SEQUENCE
  Synthetic Construct
GKNRGK

SEQ ID NO: 13968 - protein, 6 aa, ARTIFICIAL SEQUENCE
  Synthetic Construct
GKNRHK

SEQ ID NO: 13969 - protein, 6 aa, ARTIFICIAL SEQUENCE
  Synthetic Construct
GKNRIK

SEQ ID NO: 13970 - protein, 6 aa, ARTIFICIAL SEQUENCE
  Synthetic Construct
GKNRLK

SEQ ID NO: 13971 - protein, 6 aa, ARTIFICIAL SEQUENCE
  Synthetic Construct
GKNRNK

SEQ ID NO: 13972 - protein, 6 aa, ARTIFICIAL SEQUENCE
  Synthetic Construct
GKNRQK

SEQ ID NO: 13973 - protein, 6 aa, ARTIFICIAL SEQUENCE
  Synthetic Construct
GKNRRK

SEQ ID NO: 13974 - protein, 6 aa, ARTIFICIAL SEQUENCE
  Synthetic Construct
GKNRSK

SEQ ID NO: 13975 - protein, 6 aa, ARTIFICIAL SEQUENCE
  Synthetic Construct
GKNRTK

SEQ ID NO: 13976 - protein, 6 aa, ARTIFICIAL SEQUENCE
  Synthetic Construct
GKNRYK

SEQ ID NO: 13977 - protein, 6 aa, ARTIFICIAL SEQUENCE
  Synthetic Construct
GKNSAK

SEQ ID NO: 13978 - protein, 6 aa, ARTIFICIAL SEQUENCE
  Synthetic Construct
GKNSDK

SEQ ID NO: 13979 - protein, 6 aa, ARTIFICIAL SEQUENCE
  Synthetic Construct
GKNSEK

SEQ ID NO: 13980 - protein, 6 aa, ARTIFICIAL SEQUENCE
  Synthetic Construct
GKNSFK

SEQ ID NO: 13981 - protein, 6 aa, ARTIFICIAL SEQUENCE
  Synthetic Construct
GKNSGK

SEQ ID NO: 13982 - protein, 6 aa, ARTIFICIAL SEQUENCE
  Synthetic Construct
GKNSHK

SEQ ID NO: 13983 - protein, 6 aa, ARTIFICIAL SEQUENCE
  Synthetic Construct
GKNSIK

SEQ ID NO: 13984 - protein, 6 aa, ARTIFICIAL SEQUENCE
  Synthetic Construct
GKNSLK

SEQ ID NO: 13985 - protein, 6 aa, ARTIFICIAL SEQUENCE
  Synthetic Construct
GKNSNK

SEQ ID NO: 13986 - protein, 6 aa, ARTIFICIAL SEQUENCE
  Synthetic Construct
GKNSQK

SEQ ID NO: 13987 - protein, 6 aa, ARTIFICIAL SEQUENCE
  Synthetic Construct
GKNSRK

SEQ ID NO: 13988 - protein, 6 aa, ARTIFICIAL SEQUENCE
  Synthetic Construct
GKNSSK

SEQ ID NO: 13989 - protein, 6 aa, ARTIFICIAL SEQUENCE
  Synthetic Construct
GKNSTK

SEQ ID NO: 13990 - protein, 6 aa, ARTIFICIAL SEQUENCE
  Synthetic Construct
GKNSYK

SEQ ID NO: 13991 - protein, 6 aa, ARTIFICIAL SEQUENCE
  Synthetic Construct
GKNTAK

SEQ ID NO: 13992 - protein, 6 aa, ARTIFICIAL SEQUENCE
  Synthetic Construct
GKNTDK

SEQ ID NO: 13993 - protein, 6 aa, ARTIFICIAL SEQUENCE
  Synthetic Construct
GKNTEK

SEQ ID NO: 13994 - protein, 6 aa, ARTIFICIAL SEQUENCE
  Synthetic Construct
GKNTFK

SEQ ID NO: 13995 - protein, 6 aa, ARTIFICIAL SEQUENCE
  Synthetic Construct
GKNTGK

SEQ ID NO: 13996 - protein, 6 aa, ARTIFICIAL SEQUENCE
  Synthetic Construct
GKNTHK

SEQ ID NO: 13997 - protein, 6 aa, ARTIFICIAL SEQUENCE
  Synthetic Construct
GKNTIK

SEQ ID NO: 13998 - protein, 6 aa, ARTIFICIAL SEQUENCE
  Synthetic Construct
GKNTLK

SEQ ID NO: 13999 - protein, 6 aa, ARTIFICIAL SEQUENCE
  Synthetic Construct
GKNTNK

SEQ ID NO: 14000 - protein, 6 aa, ARTIFICIAL SEQUENCE
  Synthetic Construct
GKNTQK

SEQ ID NO: 14001 - protein, 6 aa, ARTIFICIAL SEQUENCE
  Synthetic Construct
GKNTRK

SEQ ID NO: 14002 - protein, 6 aa, ARTIFICIAL SEQUENCE
  Synthetic Construct
GKNTSK

SEQ ID NO: 14003 - protein, 6 aa, ARTIFICIAL SEQUENCE
  Synthetic Construct
GKNTTK

SEQ ID NO: 14004 - protein, 6 aa, ARTIFICIAL SEQUENCE
  Synthetic Construct
GKNTYK

SEQ ID NO: 14005 - protein, 6 aa, ARTIFICIAL SEQUENCE
  Synthetic Construct
GKNYAK

SEQ ID NO: 14006 - protein, 6 aa, ARTIFICIAL SEQUENCE
  Synthetic Construct
GKNYDK

SEQ ID NO: 14007 - protein, 6 aa, ARTIFICIAL SEQUENCE
  Synthetic Construct
GKNYEK

SEQ ID NO: 14008 - protein, 6 aa, ARTIFICIAL SEQUENCE
  Synthetic Construct
GKNYFK

SEQ ID NO: 14009 - protein, 6 aa, ARTIFICIAL SEQUENCE
  Synthetic Construct
GKNYGK

SEQ ID NO: 14010 - protein, 6 aa, ARTIFICIAL SEQUENCE
  Synthetic Construct
GKNYHK

SEQ ID NO: 14011 - protein, 6 aa, ARTIFICIAL SEQUENCE
  Synthetic Construct
GKNYIK

SEQ ID NO: 14012 - protein, 6 aa, ARTIFICIAL SEQUENCE
  Synthetic Construct
GKNYLK

SEQ ID NO: 14013 - protein, 6 aa, ARTIFICIAL SEQUENCE
  Synthetic Construct
GKNYNK

SEQ ID NO: 14014 - protein, 6 aa, ARTIFICIAL SEQUENCE
  Synthetic Construct
GKNYQK

SEQ ID NO: 14015 - protein, 6 aa, ARTIFICIAL SEQUENCE
  Synthetic Construct
GKNYRK

SEQ ID NO: 14016 - protein, 6 aa, ARTIFICIAL SEQUENCE
  Synthetic Construct
GKNYSK

SEQ ID NO: 14017 - protein, 6 aa, ARTIFICIAL SEQUENCE
  Synthetic Construct
GKNYTK

SEQ ID NO: 14018 - protein, 6 aa, ARTIFICIAL SEQUENCE
  Synthetic Construct
GKNYYK

SEQ ID NO: 14019 - protein, 6 aa, ARTIFICIAL SEQUENCE
  Synthetic Construct
GKPAAK

SEQ ID NO: 14020 - protein, 6 aa, ARTIFICIAL SEQUENCE
  Synthetic Construct
GKPADK

SEQ ID NO: 14021 - protein, 6 aa, ARTIFICIAL SEQUENCE
  Synthetic Construct
GKPAEK

SEQ ID NO: 14022 - protein, 6 aa, ARTIFICIAL SEQUENCE
  Synthetic Construct
GKPAFK

SEQ ID NO: 14023 - protein, 6 aa, ARTIFICIAL SEQUENCE
  Synthetic Construct
GKPAGK

SEQ ID NO: 14024 - protein, 6 aa, ARTIFICIAL SEQUENCE
  Synthetic Construct
GKPAHK

SEQ ID NO: 14025 - protein, 6 aa, ARTIFICIAL SEQUENCE
  Synthetic Construct
GKPAIK

SEQ ID NO: 14026 - protein, 6 aa, ARTIFICIAL SEQUENCE
  Synthetic Construct
GKPALK

SEQ ID NO: 14027 - protein, 6 aa, ARTIFICIAL SEQUENCE
  Synthetic Construct
GKPANK

SEQ ID NO: 14028 - protein, 6 aa, ARTIFICIAL SEQUENCE
  Synthetic Construct
GKPAQK

SEQ ID NO: 14029 - protein, 6 aa, ARTIFICIAL SEQUENCE
  Synthetic Construct
GKPARK

SEQ ID NO: 14030 - protein, 6 aa, ARTIFICIAL SEQUENCE
  Synthetic Construct
GKPASK

SEQ ID NO: 14031 - protein, 6 aa, ARTIFICIAL SEQUENCE
  Synthetic Construct
GKPATK

SEQ ID NO: 14032 - protein, 6 aa, ARTIFICIAL SEQUENCE
  Synthetic Construct
GKPAYK

SEQ ID NO: 14033 - protein, 6 aa, ARTIFICIAL SEQUENCE
  Synthetic Construct
GKPDAK

SEQ ID NO: 14034 - protein, 6 aa, ARTIFICIAL SEQUENCE
  Synthetic Construct
GKPDDK

SEQ ID NO: 14035 - protein, 6 aa, ARTIFICIAL SEQUENCE
  Synthetic Construct
GKPDEK

SEQ ID NO: 14036 - protein, 6 aa, ARTIFICIAL SEQUENCE
  Synthetic Construct
GKPDFK

SEQ ID NO: 14037 - protein, 6 aa, ARTIFICIAL SEQUENCE
  Synthetic Construct
GKPDGK

SEQ ID NO: 14038 - protein, 6 aa, ARTIFICIAL SEQUENCE
  Synthetic Construct
GKPDHK

SEQ ID NO: 14039 - protein, 6 aa, ARTIFICIAL SEQUENCE
  Synthetic Construct
GKPDIK

SEQ ID NO: 14040 - protein, 6 aa, ARTIFICIAL SEQUENCE
  Synthetic Construct
GKPDLK

SEQ ID NO: 14041 - protein, 6 aa, ARTIFICIAL SEQUENCE
  Synthetic Construct
GKPDNK

SEQ ID NO: 14042 - protein, 6 aa, ARTIFICIAL SEQUENCE
  Synthetic Construct
GKPDQK

SEQ ID NO: 14043 - protein, 6 aa, ARTIFICIAL SEQUENCE
  Synthetic Construct
GKPDRK

SEQ ID NO: 14044 - protein, 6 aa, ARTIFICIAL SEQUENCE
  Synthetic Construct
GKPDSK

SEQ ID NO: 14045 - protein, 6 aa, ARTIFICIAL SEQUENCE
  Synthetic Construct
GKPDTK

SEQ ID NO: 14046 - protein, 6 aa, ARTIFICIAL SEQUENCE
  Synthetic Construct
GKPDYK

SEQ ID NO: 14047 - protein, 6 aa, ARTIFICIAL SEQUENCE
  Synthetic Construct
GKPEAK

SEQ ID NO: 14048 - protein, 6 aa, ARTIFICIAL SEQUENCE
  Synthetic Construct
GKPEDK

SEQ ID NO: 14049 - protein, 6 aa, ARTIFICIAL SEQUENCE
  Synthetic Construct
GKPEEK

SEQ ID NO: 14050 - protein, 6 aa, ARTIFICIAL SEQUENCE
  Synthetic Construct
GKPEFK

SEQ ID NO: 14051 - protein, 6 aa, ARTIFICIAL SEQUENCE
  Synthetic Construct
GKPEGK

SEQ ID NO: 14052 - protein, 6 aa, ARTIFICIAL SEQUENCE
  Synthetic Construct
GKPEHK

SEQ ID NO: 14053 - protein, 6 aa, ARTIFICIAL SEQUENCE
  Synthetic Construct
GKPEIK

SEQ ID NO: 14054 - protein, 6 aa, ARTIFICIAL SEQUENCE
  Synthetic Construct
GKPELK

SEQ ID NO: 14055 - protein, 6 aa, ARTIFICIAL SEQUENCE
  Synthetic Construct
GKPENK

SEQ ID NO: 14056 - protein, 6 aa, ARTIFICIAL SEQUENCE
  Synthetic Construct
GKPEQK

SEQ ID NO: 14057 - protein, 6 aa, ARTIFICIAL SEQUENCE
  Synthetic Construct
GKPERK

SEQ ID NO: 14058 - protein, 6 aa, ARTIFICIAL SEQUENCE
  Synthetic Construct
GKPESK

SEQ ID NO: 14059 - protein, 6 aa, ARTIFICIAL SEQUENCE
  Synthetic Construct
GKPETK

SEQ ID NO: 14060 - protein, 6 aa, ARTIFICIAL SEQUENCE
  Synthetic Construct
GKPEYK

SEQ ID NO: 14061 - protein, 6 aa, ARTIFICIAL SEQUENCE
  Synthetic Construct
GKPFAK

SEQ ID NO: 14062 - protein, 6 aa, ARTIFICIAL SEQUENCE
  Synthetic Construct
GKPFDK

SEQ ID NO: 14063 - protein, 6 aa, ARTIFICIAL SEQUENCE
  Synthetic Construct
GKPFEK

SEQ ID NO: 14064 - protein, 6 aa, ARTIFICIAL SEQUENCE
  Synthetic Construct
GKPFFK

SEQ ID NO: 14065 - protein, 6 aa, ARTIFICIAL SEQUENCE
  Synthetic Construct
GKPFGK

SEQ ID NO: 14066 - protein, 6 aa, ARTIFICIAL SEQUENCE
  Synthetic Construct
GKPFHK

SEQ ID NO: 14067 - protein, 6 aa, ARTIFICIAL SEQUENCE
  Synthetic Construct
GKPFIK

SEQ ID NO: 14068 - protein, 6 aa, ARTIFICIAL SEQUENCE
  Synthetic Construct
GKPFLK

SEQ ID NO: 14069 - protein, 6 aa, ARTIFICIAL SEQUENCE
  Synthetic Construct
GKPFNK

SEQ ID NO: 14070 - protein, 6 aa, ARTIFICIAL SEQUENCE
  Synthetic Construct
GKPFQK

SEQ ID NO: 14071 - protein, 6 aa, ARTIFICIAL SEQUENCE
  Synthetic Construct
GKPFRK

SEQ ID NO: 14072 - protein, 6 aa, ARTIFICIAL SEQUENCE
  Synthetic Construct
GKPFSK

SEQ ID NO: 14073 - protein, 6 aa, ARTIFICIAL SEQUENCE
  Synthetic Construct
GKPFTK

SEQ ID NO: 14074 - protein, 6 aa, ARTIFICIAL SEQUENCE
  Synthetic Construct
GKPFYK

SEQ ID NO: 14075 - protein, 6 aa, ARTIFICIAL SEQUENCE
  Synthetic Construct
GKPGAK

SEQ ID NO: 14076 - protein, 6 aa, ARTIFICIAL SEQUENCE
  Synthetic Construct
GKPGDK

SEQ ID NO: 14077 - protein, 6 aa, ARTIFICIAL SEQUENCE
  Synthetic Construct
GKPGEK

SEQ ID NO: 14078 - protein, 6 aa, ARTIFICIAL SEQUENCE
  Synthetic Construct
GKPGFK

SEQ ID NO: 14079 - protein, 6 aa, ARTIFICIAL SEQUENCE
  Synthetic Construct
GKPGGK

SEQ ID NO: 14080 - protein, 6 aa, ARTIFICIAL SEQUENCE
  Synthetic Construct
GKPGHK

SEQ ID NO: 14081 - protein, 6 aa, ARTIFICIAL SEQUENCE
  Synthetic Construct
GKPGIK

SEQ ID NO: 14082 - protein, 6 aa, ARTIFICIAL SEQUENCE
  Synthetic Construct
GKPGLK

SEQ ID NO: 14083 - protein, 6 aa, ARTIFICIAL SEQUENCE
  Synthetic Construct
GKPGNK

SEQ ID NO: 14084 - protein, 6 aa, ARTIFICIAL SEQUENCE
  Synthetic Construct
GKPGQK

SEQ ID NO: 14085 - protein, 6 aa, ARTIFICIAL SEQUENCE
  Synthetic Construct
GKPGRK

SEQ ID NO: 14086 - protein, 6 aa, ARTIFICIAL SEQUENCE
  Synthetic Construct
GKPGSK

SEQ ID NO: 14087 - protein, 6 aa, ARTIFICIAL SEQUENCE
  Synthetic Construct
GKPGTK

SEQ ID NO: 14088 - protein, 6 aa, ARTIFICIAL SEQUENCE
  Synthetic Construct
GKPGYK

SEQ ID NO: 14089 - protein, 6 aa, ARTIFICIAL SEQUENCE
  Synthetic Construct
GKPHAK

SEQ ID NO: 14090 - protein, 6 aa, ARTIFICIAL SEQUENCE
  Synthetic Construct
GKPHDK

SEQ ID NO: 14091 - protein, 6 aa, ARTIFICIAL SEQUENCE
  Synthetic Construct
GKPHEK

SEQ ID NO: 14092 - protein, 6 aa, ARTIFICIAL SEQUENCE
  Synthetic Construct
GKPHFK

SEQ ID NO: 14093 - protein, 6 aa, ARTIFICIAL SEQUENCE
  Synthetic Construct
GKPHGK

SEQ ID NO: 14094 - protein, 6 aa, ARTIFICIAL SEQUENCE
  Synthetic Construct
GKPHHK

SEQ ID NO: 14095 - protein, 6 aa, ARTIFICIAL SEQUENCE
  Synthetic Construct
GKPHIK

SEQ ID NO: 14096 - protein, 6 aa, ARTIFICIAL SEQUENCE
  Synthetic Construct
GKPHLK

SEQ ID NO: 14097 - protein, 6 aa, ARTIFICIAL SEQUENCE
  Synthetic Construct
GKPHNK

SEQ ID NO: 14098 - protein, 6 aa, ARTIFICIAL SEQUENCE
  Synthetic Construct
GKPHQK

SEQ ID NO: 14099 - protein, 6 aa, ARTIFICIAL SEQUENCE
  Synthetic Construct
GKPHRK

SEQ ID NO: 14100 - protein, 6 aa, ARTIFICIAL SEQUENCE
  Synthetic Construct
GKPHSK

SEQ ID NO: 14101 - protein, 6 aa, ARTIFICIAL SEQUENCE
  Synthetic Construct
GKPHTK

SEQ ID NO: 14102 - protein, 6 aa, ARTIFICIAL SEQUENCE
  Synthetic Construct
GKPHYK

SEQ ID NO: 14103 - protein, 6 aa, ARTIFICIAL SEQUENCE
  Synthetic Construct
GKPIAK

SEQ ID NO: 14104 - protein, 6 aa, ARTIFICIAL SEQUENCE
  Synthetic Construct
GKPIDK

SEQ ID NO: 14105 - protein, 6 aa, ARTIFICIAL SEQUENCE
  Synthetic Construct
GKPIEK

SEQ ID NO: 14106 - protein, 6 aa, ARTIFICIAL SEQUENCE
  Synthetic Construct
GKPIFK

SEQ ID NO: 14107 - protein, 6 aa, ARTIFICIAL SEQUENCE
  Synthetic Construct
GKPIGK

SEQ ID NO: 14108 - protein, 6 aa, ARTIFICIAL SEQUENCE
  Synthetic Construct
GKPIHK

SEQ ID NO: 14109 - protein, 6 aa, ARTIFICIAL SEQUENCE
  Synthetic Construct
GKPIIK

SEQ ID NO: 14110 - protein, 6 aa, ARTIFICIAL SEQUENCE
  Synthetic Construct
GKPILK

SEQ ID NO: 14111 - protein, 6 aa, ARTIFICIAL SEQUENCE
  Synthetic Construct
GKPINK

SEQ ID NO: 14112 - protein, 6 aa, ARTIFICIAL SEQUENCE
  Synthetic Construct
GKPIQK

SEQ ID NO: 14113 - protein, 6 aa, ARTIFICIAL SEQUENCE
  Synthetic Construct
GKPIRK

SEQ ID NO: 14114 - protein, 6 aa, ARTIFICIAL SEQUENCE
  Synthetic Construct
GKPISK

SEQ ID NO: 14115 - protein, 6 aa, ARTIFICIAL SEQUENCE
  Synthetic Construct
GKPITK

SEQ ID NO: 14116 - protein, 6 aa, ARTIFICIAL SEQUENCE
  Synthetic Construct
GKPIYK

SEQ ID NO: 14117 - protein, 6 aa, ARTIFICIAL SEQUENCE
  Synthetic Construct
GKPLAK

SEQ ID NO: 14118 - protein, 6 aa, ARTIFICIAL SEQUENCE
  Synthetic Construct
GKPLDK

SEQ ID NO: 14119 - protein, 6 aa, ARTIFICIAL SEQUENCE
  Synthetic Construct
GKPLEK

SEQ ID NO: 14120 - protein, 6 aa, ARTIFICIAL SEQUENCE
  Synthetic Construct
GKPLFK

SEQ ID NO: 14121 - protein, 6 aa, ARTIFICIAL SEQUENCE
  Synthetic Construct
GKPLGK

SEQ ID NO: 14122 - protein, 6 aa, ARTIFICIAL SEQUENCE
  Synthetic Construct
GKPLHK

SEQ ID NO: 14123 - protein, 6 aa, ARTIFICIAL SEQUENCE
  Synthetic Construct
GKPLIK

SEQ ID NO: 14124 - protein, 6 aa, ARTIFICIAL SEQUENCE
  Synthetic Construct
GKPLLK

SEQ ID NO: 14125 - protein, 6 aa, ARTIFICIAL SEQUENCE
  Synthetic Construct
GKPLNK

SEQ ID NO: 14126 - protein, 6 aa, ARTIFICIAL SEQUENCE
  Synthetic Construct
GKPLQK

SEQ ID NO: 14127 - protein, 6 aa, ARTIFICIAL SEQUENCE
  Synthetic Construct
GKPLRK

SEQ ID NO: 14128 - protein, 6 aa, ARTIFICIAL SEQUENCE
  Synthetic Construct
GKPLSK

SEQ ID NO: 14129 - protein, 6 aa, ARTIFICIAL SEQUENCE
  Synthetic Construct
GKPLTK

SEQ ID NO: 14130 - protein, 6 aa, ARTIFICIAL SEQUENCE
  Synthetic Construct
GKPLYK

SEQ ID NO: 14131 - protein, 6 aa, ARTIFICIAL SEQUENCE
  Synthetic Construct
GKPNAK

SEQ ID NO: 14132 - protein, 6 aa, ARTIFICIAL SEQUENCE
  Synthetic Construct
GKPNDK

SEQ ID NO: 14133 - protein, 6 aa, ARTIFICIAL SEQUENCE
  Synthetic Construct
GKPNEK

SEQ ID NO: 14134 - protein, 6 aa, ARTIFICIAL SEQUENCE
  Synthetic Construct
GKPNFK

SEQ ID NO: 14135 - protein, 6 aa, ARTIFICIAL SEQUENCE
  Synthetic Construct
GKPNGK

SEQ ID NO: 14136 - protein, 6 aa, ARTIFICIAL SEQUENCE
  Synthetic Construct
GKPNHK

SEQ ID NO: 14137 - protein, 6 aa, ARTIFICIAL SEQUENCE
  Synthetic Construct
GKPNIK

SEQ ID NO: 14138 - protein, 6 aa, ARTIFICIAL SEQUENCE
  Synthetic Construct
GKPNLK

SEQ ID NO: 14139 - protein, 6 aa, ARTIFICIAL SEQUENCE
  Synthetic Construct
GKPNNK

SEQ ID NO: 14140 - protein, 6 aa, ARTIFICIAL SEQUENCE
  Synthetic Construct
GKPNQK

SEQ ID NO: 14141 - protein, 6 aa, ARTIFICIAL SEQUENCE
  Synthetic Construct
GKPNRK

SEQ ID NO: 14142 - protein, 6 aa, ARTIFICIAL SEQUENCE
  Synthetic Construct
GKPNSK

SEQ ID NO: 14143 - protein, 6 aa, ARTIFICIAL SEQUENCE
  Synthetic Construct
GKPNTK

SEQ ID NO: 14144 - protein, 6 aa, ARTIFICIAL SEQUENCE
  Synthetic Construct
GKPNYK

SEQ ID NO: 14145 - protein, 6 aa, ARTIFICIAL SEQUENCE
  Synthetic Construct
GKPQAK

SEQ ID NO: 14146 - protein, 6 aa, ARTIFICIAL SEQUENCE
  Synthetic Construct
GKPQDK

SEQ ID NO: 14147 - protein, 6 aa, ARTIFICIAL SEQUENCE
  Synthetic Construct
GKPQEK

SEQ ID NO: 14148 - protein, 6 aa, ARTIFICIAL SEQUENCE
  Synthetic Construct
GKPQFK

SEQ ID NO: 14149 - protein, 6 aa, ARTIFICIAL SEQUENCE
  Synthetic Construct
GKPQGK

SEQ ID NO: 14150 - protein, 6 aa, ARTIFICIAL SEQUENCE
  Synthetic Construct
GKPQHK

SEQ ID NO: 14151 - protein, 6 aa, ARTIFICIAL SEQUENCE
  Synthetic Construct
GKPQIK

SEQ ID NO: 14152 - protein, 6 aa, ARTIFICIAL SEQUENCE
  Synthetic Construct
GKPQLK

SEQ ID NO: 14153 - protein, 6 aa, ARTIFICIAL SEQUENCE
  Synthetic Construct
GKPQNK

SEQ ID NO: 14154 - protein, 6 aa, ARTIFICIAL SEQUENCE
  Synthetic Construct
GKPQQK

SEQ ID NO: 14155 - protein, 6 aa, ARTIFICIAL SEQUENCE
  Synthetic Construct
GKPQRK

SEQ ID NO: 14156 - protein, 6 aa, ARTIFICIAL SEQUENCE
  Synthetic Construct
GKPQSK

SEQ ID NO: 14157 - protein, 6 aa, ARTIFICIAL SEQUENCE
  Synthetic Construct
GKPQTK

SEQ ID NO: 14158 - protein, 6 aa, ARTIFICIAL SEQUENCE
  Synthetic Construct
GKPQYK

SEQ ID NO: 14159 - protein, 6 aa, ARTIFICIAL SEQUENCE
  Synthetic Construct
GKPRAK

SEQ ID NO: 14160 - protein, 6 aa, ARTIFICIAL SEQUENCE
  Synthetic Construct
GKPRDK

SEQ ID NO: 14161 - protein, 6 aa, ARTIFICIAL SEQUENCE
  Synthetic Construct
GKPREK

SEQ ID NO: 14162 - protein, 6 aa, ARTIFICIAL SEQUENCE
  Synthetic Construct
GKPRFK

SEQ ID NO: 14163 - protein, 6 aa, ARTIFICIAL SEQUENCE
  Synthetic Construct
GKPRGK

SEQ ID NO: 14164 - protein, 6 aa, ARTIFICIAL SEQUENCE
  Synthetic Construct
GKPRHK

SEQ ID NO: 14165 - protein, 6 aa, ARTIFICIAL SEQUENCE
  Synthetic Construct
GKPRIK

SEQ ID NO: 14166 - protein, 6 aa, ARTIFICIAL SEQUENCE
  Synthetic Construct
GKPRLK

SEQ ID NO: 14167 - protein, 6 aa, ARTIFICIAL SEQUENCE
  Synthetic Construct
GKPRNK

SEQ ID NO: 14168 - protein, 6 aa, ARTIFICIAL SEQUENCE
  Synthetic Construct
GKPRQK

SEQ ID NO: 14169 - protein, 6 aa, ARTIFICIAL SEQUENCE
  Synthetic Construct
GKPRRK

SEQ ID NO: 14170 - protein, 6 aa, ARTIFICIAL SEQUENCE
  Synthetic Construct
GKPRSK

SEQ ID NO: 14171 - protein, 6 aa, ARTIFICIAL SEQUENCE
  Synthetic Construct
GKPRTK

SEQ ID NO: 14172 - protein, 6 aa, ARTIFICIAL SEQUENCE
  Synthetic Construct
GKPRYK

SEQ ID NO: 14173 - protein, 6 aa, ARTIFICIAL SEQUENCE
  Synthetic Construct
GKPSAK

SEQ ID NO: 14174 - protein, 6 aa, ARTIFICIAL SEQUENCE
  Synthetic Construct
GKPSDK

SEQ ID NO: 14175 - protein, 6 aa, ARTIFICIAL SEQUENCE
  Synthetic Construct
GKPSEK

SEQ ID NO: 14176 - protein, 6 aa, ARTIFICIAL SEQUENCE
  Synthetic Construct
GKPSFK

SEQ ID NO: 14177 - protein, 6 aa, ARTIFICIAL SEQUENCE
  Synthetic Construct
GKPSGK

SEQ ID NO: 14178 - protein, 6 aa, ARTIFICIAL SEQUENCE
  Synthetic Construct
GKPSHK

SEQ ID NO: 14179 - protein, 6 aa, ARTIFICIAL SEQUENCE
  Synthetic Construct
GKPSIK

SEQ ID NO: 14180 - protein, 6 aa, ARTIFICIAL SEQUENCE
  Synthetic Construct
GKPSLK

SEQ ID NO: 14181 - protein, 6 aa, ARTIFICIAL SEQUENCE
  Synthetic Construct
GKPSNK

SEQ ID NO: 14182 - protein, 6 aa, ARTIFICIAL SEQUENCE
  Synthetic Construct
GKPSQK

SEQ ID NO: 14183 - protein, 6 aa, ARTIFICIAL SEQUENCE
  Synthetic Construct
GKPSRK

SEQ ID NO: 14184 - protein, 6 aa, ARTIFICIAL SEQUENCE
  Synthetic Construct
GKPSSK

SEQ ID NO: 14185 - protein, 6 aa, ARTIFICIAL SEQUENCE
  Synthetic Construct
GKPSTK

SEQ ID NO: 14186 - protein, 6 aa, ARTIFICIAL SEQUENCE
  Synthetic Construct
GKPSYK

SEQ ID NO: 14187 - protein, 6 aa, ARTIFICIAL SEQUENCE
  Synthetic Construct
GKPTAK

SEQ ID NO: 14188 - protein, 6 aa, ARTIFICIAL SEQUENCE
  Synthetic Construct
GKPTDK

SEQ ID NO: 14189 - protein, 6 aa, ARTIFICIAL SEQUENCE
  Synthetic Construct
GKPTEK

SEQ ID NO: 14190 - protein, 6 aa, ARTIFICIAL SEQUENCE
  Synthetic Construct
GKPTFK

SEQ ID NO: 14191 - protein, 6 aa, ARTIFICIAL SEQUENCE
  Synthetic Construct
GKPTGK

SEQ ID NO: 14192 - protein, 6 aa, ARTIFICIAL SEQUENCE
  Synthetic Construct
GKPTHK

SEQ ID NO: 14193 - protein, 6 aa, ARTIFICIAL SEQUENCE
  Synthetic Construct
GKPTIK

SEQ ID NO: 14194 - protein, 6 aa, ARTIFICIAL SEQUENCE
  Synthetic Construct
GKPTLK

SEQ ID NO: 14195 - protein, 6 aa, ARTIFICIAL SEQUENCE
  Synthetic Construct
GKPTNK

SEQ ID NO: 14196 - protein, 6 aa, ARTIFICIAL SEQUENCE
  Synthetic Construct
GKPTQK

SEQ ID NO: 14197 - protein, 6 aa, ARTIFICIAL SEQUENCE
  Synthetic Construct
GKPTRK

SEQ ID NO: 14198 - protein, 6 aa, ARTIFICIAL SEQUENCE
  Synthetic Construct
GKPTSK

SEQ ID NO: 14199 - protein, 6 aa, ARTIFICIAL SEQUENCE
  Synthetic Construct
GKPTTK

SEQ ID NO: 14200 - protein, 6 aa, ARTIFICIAL SEQUENCE
  Synthetic Construct
GKPTYK

SEQ ID NO: 14201 - protein, 6 aa, ARTIFICIAL SEQUENCE
  Synthetic Construct
GKPYAK

SEQ ID NO: 14202 - protein, 6 aa, ARTIFICIAL SEQUENCE
  Synthetic Construct
GKPYDK

SEQ ID NO: 14203 - protein, 6 aa, ARTIFICIAL SEQUENCE
  Synthetic Construct
GKPYEK

SEQ ID NO: 14204 - protein, 6 aa, ARTIFICIAL SEQUENCE
  Synthetic Construct
GKPYFK

SEQ ID NO: 14205 - protein, 6 aa, ARTIFICIAL SEQUENCE
  Synthetic Construct
GKPYGK

SEQ ID NO: 14206 - protein, 6 aa, ARTIFICIAL SEQUENCE
  Synthetic Construct
GKPYHK

SEQ ID NO: 14207 - protein, 6 aa, ARTIFICIAL SEQUENCE
  Synthetic Construct
GKPYIK

SEQ ID NO: 14208 - protein, 6 aa, ARTIFICIAL SEQUENCE
  Synthetic Construct
GKPYLK

SEQ ID NO: 14209 - protein, 6 aa, ARTIFICIAL SEQUENCE
  Synthetic Construct
GKPYNK

SEQ ID NO: 14210 - protein, 6 aa, ARTIFICIAL SEQUENCE
  Synthetic Construct
GKPYQK

SEQ ID NO: 14211 - protein, 6 aa, ARTIFICIAL SEQUENCE
  Synthetic Construct
GKPYRK

SEQ ID NO: 14212 - protein, 6 aa, ARTIFICIAL SEQUENCE
  Synthetic Construct
GKPYSK

SEQ ID NO: 14213 - protein, 6 aa, ARTIFICIAL SEQUENCE
  Synthetic Construct
GKPYTK

SEQ ID NO: 14214 - protein, 6 aa, ARTIFICIAL SEQUENCE
  Synthetic Construct
GKPYYK

SEQ ID NO: 14215 - protein, 6 aa, ARTIFICIAL SEQUENCE
  Synthetic Construct
GKQAAK

SEQ ID NO: 14216 - protein, 6 aa, ARTIFICIAL SEQUENCE
  Synthetic Construct
GKQADK

SEQ ID NO: 14217 - protein, 6 aa, ARTIFICIAL SEQUENCE
  Synthetic Construct
GKQAEK

SEQ ID NO: 14218 - protein, 6 aa, ARTIFICIAL SEQUENCE
  Synthetic Construct
GKQAFK

SEQ ID NO: 14219 - protein, 6 aa, ARTIFICIAL SEQUENCE
  Synthetic Construct
GKQAGK

SEQ ID NO: 14220 - protein, 6 aa, ARTIFICIAL SEQUENCE
  Synthetic Construct
GKQAHK

SEQ ID NO: 14221 - protein, 6 aa, ARTIFICIAL SEQUENCE
  Synthetic Construct
GKQAIK

SEQ ID NO: 14222 - protein, 6 aa, ARTIFICIAL SEQUENCE
  Synthetic Construct
GKQALK

SEQ ID NO: 14223 - protein, 6 aa, ARTIFICIAL SEQUENCE
  Synthetic Construct
GKQANK

SEQ ID NO: 14224 - protein, 6 aa, ARTIFICIAL SEQUENCE
  Synthetic Construct
GKQAQK

SEQ ID NO: 14225 - protein, 6 aa, ARTIFICIAL SEQUENCE
  Synthetic Construct
GKQARK

SEQ ID NO: 14226 - protein, 6 aa, ARTIFICIAL SEQUENCE
  Synthetic Construct
GKQASK

SEQ ID NO: 14227 - protein, 6 aa, ARTIFICIAL SEQUENCE
  Synthetic Construct
GKQATK

SEQ ID NO: 14228 - protein, 6 aa, ARTIFICIAL SEQUENCE
  Synthetic Construct
GKQAYK

SEQ ID NO: 14229 - protein, 6 aa, ARTIFICIAL SEQUENCE
  Synthetic Construct
GKQDAK

SEQ ID NO: 14230 - protein, 6 aa, ARTIFICIAL SEQUENCE
  Synthetic Construct
GKQDDK

SEQ ID NO: 14231 - protein, 6 aa, ARTIFICIAL SEQUENCE
  Synthetic Construct
GKQDEK

SEQ ID NO: 14232 - protein, 6 aa, ARTIFICIAL SEQUENCE
  Synthetic Construct
GKQDFK

SEQ ID NO: 14233 - protein, 6 aa, ARTIFICIAL SEQUENCE
  Synthetic Construct
GKQDGK

SEQ ID NO: 14234 - protein, 6 aa, ARTIFICIAL SEQUENCE
  Synthetic Construct
GKQDHK

SEQ ID NO: 14235 - protein, 6 aa, ARTIFICIAL SEQUENCE
  Synthetic Construct
GKQDIK

SEQ ID NO: 14236 - protein, 6 aa, ARTIFICIAL SEQUENCE
  Synthetic Construct
GKQDLK

SEQ ID NO: 14237 - protein, 6 aa, ARTIFICIAL SEQUENCE
  Synthetic Construct
GKQDNK

SEQ ID NO: 14238 - protein, 6 aa, ARTIFICIAL SEQUENCE
  Synthetic Construct
GKQDQK

SEQ ID NO: 14239 - protein, 6 aa, ARTIFICIAL SEQUENCE
  Synthetic Construct
GKQDRK

SEQ ID NO: 14240 - protein, 6 aa, ARTIFICIAL SEQUENCE
  Synthetic Construct
GKQDSK

SEQ ID NO: 14241 - protein, 6 aa, ARTIFICIAL SEQUENCE
  Synthetic Construct
GKQDTK

SEQ ID NO: 14242 - protein, 6 aa, ARTIFICIAL SEQUENCE
  Synthetic Construct
GKQDYK

SEQ ID NO: 14243 - protein, 6 aa, ARTIFICIAL SEQUENCE
  Synthetic Construct
GKQEAK

SEQ ID NO: 14244 - protein, 6 aa, ARTIFICIAL SEQUENCE
  Synthetic Construct
GKQEDK

SEQ ID NO: 14245 - protein, 6 aa, ARTIFICIAL SEQUENCE
  Synthetic Construct
GKQEEK

SEQ ID NO: 14246 - protein, 6 aa, ARTIFICIAL SEQUENCE
  Synthetic Construct
GKQEFK

SEQ ID NO: 14247 - protein, 6 aa, ARTIFICIAL SEQUENCE
  Synthetic Construct
GKQEGK

SEQ ID NO: 14248 - protein, 6 aa, ARTIFICIAL SEQUENCE
  Synthetic Construct
GKQEHK

SEQ ID NO: 14249 - protein, 6 aa, ARTIFICIAL SEQUENCE
  Synthetic Construct
GKQEIK

SEQ ID NO: 14250 - protein, 6 aa, ARTIFICIAL SEQUENCE
  Synthetic Construct
GKQELK

SEQ ID NO: 14251 - protein, 6 aa, ARTIFICIAL SEQUENCE
  Synthetic Construct
GKQENK

SEQ ID NO: 14252 - protein, 6 aa, ARTIFICIAL SEQUENCE
  Synthetic Construct
GKQEQK

SEQ ID NO: 14253 - protein, 6 aa, ARTIFICIAL SEQUENCE
  Synthetic Construct
GKQERK

SEQ ID NO: 14254 - protein, 6 aa, ARTIFICIAL SEQUENCE
  Synthetic Construct
GKQESK

SEQ ID NO: 14255 - protein, 6 aa, ARTIFICIAL SEQUENCE
  Synthetic Construct
GKQETK

SEQ ID NO: 14256 - protein, 6 aa, ARTIFICIAL SEQUENCE
  Synthetic Construct
GKQEYK

SEQ ID NO: 14257 - protein, 6 aa, ARTIFICIAL SEQUENCE
  Synthetic Construct
GKQFAK

SEQ ID NO: 14258 - protein, 6 aa, ARTIFICIAL SEQUENCE
  Synthetic Construct
GKQFDK

SEQ ID NO: 14259 - protein, 6 aa, ARTIFICIAL SEQUENCE
  Synthetic Construct
GKQFEK

SEQ ID NO: 14260 - protein, 6 aa, ARTIFICIAL SEQUENCE
  Synthetic Construct
GKQFFK

SEQ ID NO: 14261 - protein, 6 aa, ARTIFICIAL SEQUENCE
  Synthetic Construct
GKQFGK

SEQ ID NO: 14262 - protein, 6 aa, ARTIFICIAL SEQUENCE
  Synthetic Construct
GKQFHK

SEQ ID NO: 14263 - protein, 6 aa, ARTIFICIAL SEQUENCE
  Synthetic Construct
GKQFIK

SEQ ID NO: 14264 - protein, 6 aa, ARTIFICIAL SEQUENCE
  Synthetic Construct
GKQFLK

SEQ ID NO: 14265 - protein, 6 aa, ARTIFICIAL SEQUENCE
  Synthetic Construct
GKQFNK

SEQ ID NO: 14266 - protein, 6 aa, ARTIFICIAL SEQUENCE
  Synthetic Construct
GKQFQK

SEQ ID NO: 14267 - protein, 6 aa, ARTIFICIAL SEQUENCE
  Synthetic Construct
GKQFRK

SEQ ID NO: 14268 - protein, 6 aa, ARTIFICIAL SEQUENCE
  Synthetic Construct
GKQFSK

SEQ ID NO: 14269 - protein, 6 aa, ARTIFICIAL SEQUENCE
  Synthetic Construct
GKQFTK

SEQ ID NO: 14270 - protein, 6 aa, ARTIFICIAL SEQUENCE
  Synthetic Construct
GKQFYK

SEQ ID NO: 14271 - protein, 6 aa, ARTIFICIAL SEQUENCE
  Synthetic Construct
GKQGAK

SEQ ID NO: 14272 - protein, 6 aa, ARTIFICIAL SEQUENCE
  Synthetic Construct
GKQGDK

SEQ ID NO: 14273 - protein, 6 aa, ARTIFICIAL SEQUENCE
  Synthetic Construct
GKQGEK

SEQ ID NO: 14274 - protein, 6 aa, ARTIFICIAL SEQUENCE
  Synthetic Construct
GKQGFK

SEQ ID NO: 14275 - protein, 6 aa, ARTIFICIAL SEQUENCE
  Synthetic Construct
GKQGGK

SEQ ID NO: 14276 - protein, 6 aa, ARTIFICIAL SEQUENCE
  Synthetic Construct
GKQGHK

SEQ ID NO: 14277 - protein, 6 aa, ARTIFICIAL SEQUENCE
  Synthetic Construct
GKQGIK

SEQ ID NO: 14278 - protein, 6 aa, ARTIFICIAL SEQUENCE
  Synthetic Construct
GKQGLK

SEQ ID NO: 14279 - protein, 6 aa, ARTIFICIAL SEQUENCE
  Synthetic Construct
GKQGNK

SEQ ID NO: 14280 - protein, 6 aa, ARTIFICIAL SEQUENCE
  Synthetic Construct
GKQGQK

SEQ ID NO: 14281 - protein, 6 aa, ARTIFICIAL SEQUENCE
  Synthetic Construct
GKQGRK

SEQ ID NO: 14282 - protein, 6 aa, ARTIFICIAL SEQUENCE
  Synthetic Construct
GKQGSK

SEQ ID NO: 14283 - protein, 6 aa, ARTIFICIAL SEQUENCE
  Synthetic Construct
GKQGTK

SEQ ID NO: 14284 - protein, 6 aa, ARTIFICIAL SEQUENCE
  Synthetic Construct
GKQGYK

SEQ ID NO: 14285 - protein, 6 aa, ARTIFICIAL SEQUENCE
  Synthetic Construct
GKQHAK

SEQ ID NO: 14286 - protein, 6 aa, ARTIFICIAL SEQUENCE
  Synthetic Construct
GKQHDK

SEQ ID NO: 14287 - protein, 6 aa, ARTIFICIAL SEQUENCE
  Synthetic Construct
GKQHEK

SEQ ID NO: 14288 - protein, 6 aa, ARTIFICIAL SEQUENCE
  Synthetic Construct
GKQHFK

SEQ ID NO: 14289 - protein, 6 aa, ARTIFICIAL SEQUENCE
  Synthetic Construct
GKQHGK

SEQ ID NO: 14290 - protein, 6 aa, ARTIFICIAL SEQUENCE
  Synthetic Construct
GKQHHK

SEQ ID NO: 14291 - protein, 6 aa, ARTIFICIAL SEQUENCE
  Synthetic Construct
GKQHIK

SEQ ID NO: 14292 - protein, 6 aa, ARTIFICIAL SEQUENCE
  Synthetic Construct
GKQHLK

SEQ ID NO: 14293 - protein, 6 aa, ARTIFICIAL SEQUENCE
  Synthetic Construct
GKQHNK

SEQ ID NO: 14294 - protein, 6 aa, ARTIFICIAL SEQUENCE
  Synthetic Construct
GKQHQK

SEQ ID NO: 14295 - protein, 6 aa, ARTIFICIAL SEQUENCE
  Synthetic Construct
GKQHRK

SEQ ID NO: 14296 - protein, 6 aa, ARTIFICIAL SEQUENCE
  Synthetic Construct
GKQHSK

SEQ ID NO: 14297 - protein, 6 aa, ARTIFICIAL SEQUENCE
  Synthetic Construct
GKQHTK

SEQ ID NO: 14298 - protein, 6 aa, ARTIFICIAL SEQUENCE
  Synthetic Construct
GKQHYK

SEQ ID NO: 14299 - protein, 6 aa, ARTIFICIAL SEQUENCE
  Synthetic Construct
GKQIAK

SEQ ID NO: 14300 - protein, 6 aa, ARTIFICIAL SEQUENCE
  Synthetic Construct
GKQIDK

SEQ ID NO: 14301 - protein, 6 aa, ARTIFICIAL SEQUENCE
  Synthetic Construct
GKQIEK

SEQ ID NO: 14302 - protein, 6 aa, ARTIFICIAL SEQUENCE
  Synthetic Construct
GKQIFK

SEQ ID NO: 14303 - protein, 6 aa, ARTIFICIAL SEQUENCE
  Synthetic Construct
GKQIGK

SEQ ID NO: 14304 - protein, 6 aa, ARTIFICIAL SEQUENCE
  Synthetic Construct
GKQIHK

SEQ ID NO: 14305 - protein, 6 aa, ARTIFICIAL SEQUENCE
  Synthetic Construct
GKQIIK

SEQ ID NO: 14306 - protein, 6 aa, ARTIFICIAL SEQUENCE
  Synthetic Construct
GKQILK

SEQ ID NO: 14307 - protein, 6 aa, ARTIFICIAL SEQUENCE
  Synthetic Construct
GKQINK

SEQ ID NO: 14308 - protein, 6 aa, ARTIFICIAL SEQUENCE
  Synthetic Construct
GKQIQK

SEQ ID NO: 14309 - protein, 6 aa, ARTIFICIAL SEQUENCE
  Synthetic Construct
GKQIRK

SEQ ID NO: 14310 - protein, 6 aa, ARTIFICIAL SEQUENCE
  Synthetic Construct
GKQISK

SEQ ID NO: 14311 - protein, 6 aa, ARTIFICIAL SEQUENCE
  Synthetic Construct
GKQITK

SEQ ID NO: 14312 - protein, 6 aa, ARTIFICIAL SEQUENCE
  Synthetic Construct
GKQIYK

SEQ ID NO: 14313 - protein, 6 aa, ARTIFICIAL SEQUENCE
  Synthetic Construct
GKQLAK

SEQ ID NO: 14314 - protein, 6 aa, ARTIFICIAL SEQUENCE
  Synthetic Construct
GKQLDK

SEQ ID NO: 14315 - protein, 6 aa, ARTIFICIAL SEQUENCE
  Synthetic Construct
GKQLEK

SEQ ID NO: 14316 - protein, 6 aa, ARTIFICIAL SEQUENCE
  Synthetic Construct
GKQLFK

SEQ ID NO: 14317 - protein, 6 aa, ARTIFICIAL SEQUENCE
  Synthetic Construct
GKQLGK

SEQ ID NO: 14318 - protein, 6 aa, ARTIFICIAL SEQUENCE
  Synthetic Construct
GKQLHK

SEQ ID NO: 14319 - protein, 6 aa, ARTIFICIAL SEQUENCE
  Synthetic Construct
GKQLIK

SEQ ID NO: 14320 - protein, 6 aa, ARTIFICIAL SEQUENCE
  Synthetic Construct
GKQLLK

SEQ ID NO: 14321 - protein, 6 aa, ARTIFICIAL SEQUENCE
  Synthetic Construct
GKQLNK

SEQ ID NO: 14322 - protein, 6 aa, ARTIFICIAL SEQUENCE
  Synthetic Construct
GKQLQK

SEQ ID NO: 14323 - protein, 6 aa, ARTIFICIAL SEQUENCE
  Synthetic Construct
GKQLRK

SEQ ID NO: 14324 - protein, 6 aa, ARTIFICIAL SEQUENCE
  Synthetic Construct
GKQLSK

SEQ ID NO: 14325 - protein, 6 aa, ARTIFICIAL SEQUENCE
  Synthetic Construct
GKQLTK

SEQ ID NO: 14326 - protein, 6 aa, ARTIFICIAL SEQUENCE
  Synthetic Construct
GKQLYK

SEQ ID NO: 14327 - protein, 6 aa, ARTIFICIAL SEQUENCE
  Synthetic Construct
GKQNAK

SEQ ID NO: 14328 - protein, 6 aa, ARTIFICIAL SEQUENCE
  Synthetic Construct
GKQNDK

SEQ ID NO: 14329 - protein, 6 aa, ARTIFICIAL SEQUENCE
  Synthetic Construct
GKQNEK

SEQ ID NO: 14330 - protein, 6 aa, ARTIFICIAL SEQUENCE
  Synthetic Construct
GKQNFK

SEQ ID NO: 14331 - protein, 6 aa, ARTIFICIAL SEQUENCE
  Synthetic Construct
GKQNGK

SEQ ID NO: 14332 - protein, 6 aa, ARTIFICIAL SEQUENCE
  Synthetic Construct
GKQNHK

SEQ ID NO: 14333 - protein, 6 aa, ARTIFICIAL SEQUENCE
  Synthetic Construct
GKQNIK

SEQ ID NO: 14334 - protein, 6 aa, ARTIFICIAL SEQUENCE
  Synthetic Construct
GKQNLK

SEQ ID NO: 14335 - protein, 6 aa, ARTIFICIAL SEQUENCE
  Synthetic Construct
GKQNNK

SEQ ID NO: 14336 - protein, 6 aa, ARTIFICIAL SEQUENCE
  Synthetic Construct
GKQNQK

SEQ ID NO: 14337 - protein, 6 aa, ARTIFICIAL SEQUENCE
  Synthetic Construct
GKQNRK

SEQ ID NO: 14338 - protein, 6 aa, ARTIFICIAL SEQUENCE
  Synthetic Construct
GKQNSK

SEQ ID NO: 14339 - protein, 6 aa, ARTIFICIAL SEQUENCE
  Synthetic Construct
GKQNTK

SEQ ID NO: 14340 - protein, 6 aa, ARTIFICIAL SEQUENCE
  Synthetic Construct
GKQNYK

SEQ ID NO: 14341 - protein, 6 aa, ARTIFICIAL SEQUENCE
  Synthetic Construct
GKQQAK

SEQ ID NO: 14342 - protein, 6 aa, ARTIFICIAL SEQUENCE
  Synthetic Construct
GKQQDK

SEQ ID NO: 14343 - protein, 6 aa, ARTIFICIAL SEQUENCE
  Synthetic Construct
GKQQEK

SEQ ID NO: 14344 - protein, 6 aa, ARTIFICIAL SEQUENCE
  Synthetic Construct
GKQQFK

SEQ ID NO: 14345 - protein, 6 aa, ARTIFICIAL SEQUENCE
  Synthetic Construct
GKQQGK

SEQ ID NO: 14346 - protein, 6 aa, ARTIFICIAL SEQUENCE
  Synthetic Construct
GKQQHK

SEQ ID NO: 14347 - protein, 6 aa, ARTIFICIAL SEQUENCE
  Synthetic Construct
GKQQIK

SEQ ID NO: 14348 - protein, 6 aa, ARTIFICIAL SEQUENCE
  Synthetic Construct
GKQQLK

SEQ ID NO: 14349 - protein, 6 aa, ARTIFICIAL SEQUENCE
  Synthetic Construct
GKQQNK

SEQ ID NO: 14350 - protein, 6 aa, ARTIFICIAL SEQUENCE
  Synthetic Construct
GKQQQK

SEQ ID NO: 14351 - protein, 6 aa, ARTIFICIAL SEQUENCE
  Synthetic Construct
GKQQRK

SEQ ID NO: 14352 - protein, 6 aa, ARTIFICIAL SEQUENCE
  Synthetic Construct
GKQQSK

SEQ ID NO: 14353 - protein, 6 aa, ARTIFICIAL SEQUENCE
  Synthetic Construct
GKQQTK

SEQ ID NO: 14354 - protein, 6 aa, ARTIFICIAL SEQUENCE
  Synthetic Construct
GKQQYK

SEQ ID NO: 14355 - protein, 6 aa, ARTIFICIAL SEQUENCE
  Synthetic Construct
GKQRAK

SEQ ID NO: 14356 - protein, 6 aa, ARTIFICIAL SEQUENCE
  Synthetic Construct
GKQRDK

SEQ ID NO: 14357 - protein, 6 aa, ARTIFICIAL SEQUENCE
  Synthetic Construct
GKQREK

SEQ ID NO: 14358 - protein, 6 aa, ARTIFICIAL SEQUENCE
  Synthetic Construct
GKQRFK

SEQ ID NO: 14359 - protein, 6 aa, ARTIFICIAL SEQUENCE
  Synthetic Construct
GKQRGK

SEQ ID NO: 14360 - protein, 6 aa, ARTIFICIAL SEQUENCE
  Synthetic Construct
GKQRHK

SEQ ID NO: 14361 - protein, 6 aa, ARTIFICIAL SEQUENCE
  Synthetic Construct
GKQRIK

SEQ ID NO: 14362 - protein, 6 aa, ARTIFICIAL SEQUENCE
  Synthetic Construct
GKQRLK

SEQ ID NO: 14363 - protein, 6 aa, ARTIFICIAL SEQUENCE
  Synthetic Construct
GKQRNK

SEQ ID NO: 14364 - protein, 6 aa, ARTIFICIAL SEQUENCE
  Synthetic Construct
GKQRQK

SEQ ID NO: 14365 - protein, 6 aa, ARTIFICIAL SEQUENCE
  Synthetic Construct
GKQRRK

SEQ ID NO: 14366 - protein, 6 aa, ARTIFICIAL SEQUENCE
  Synthetic Construct
GKQRSK

SEQ ID NO: 14367 - protein, 6 aa, ARTIFICIAL SEQUENCE
  Synthetic Construct
GKQRTK

SEQ ID NO: 14368 - protein, 6 aa, ARTIFICIAL SEQUENCE
  Synthetic Construct
GKQRYK

SEQ ID NO: 14369 - protein, 6 aa, ARTIFICIAL SEQUENCE
  Synthetic Construct
GKQSAK

SEQ ID NO: 14370 - protein, 6 aa, ARTIFICIAL SEQUENCE
  Synthetic Construct
GKQSDK

SEQ ID NO: 14371 - protein, 6 aa, ARTIFICIAL SEQUENCE
  Synthetic Construct
GKQSEK

SEQ ID NO: 14372 - protein, 6 aa, ARTIFICIAL SEQUENCE
  Synthetic Construct
GKQSFK

SEQ ID NO: 14373 - protein, 6 aa, ARTIFICIAL SEQUENCE
  Synthetic Construct
GKQSGK

SEQ ID NO: 14374 - protein, 6 aa, ARTIFICIAL SEQUENCE
  Synthetic Construct
GKQSHK

SEQ ID NO: 14375 - protein, 6 aa, ARTIFICIAL SEQUENCE
  Synthetic Construct
GKQSIK

SEQ ID NO: 14376 - protein, 6 aa, ARTIFICIAL SEQUENCE
  Synthetic Construct
GKQSLK

SEQ ID NO: 14377 - protein, 6 aa, ARTIFICIAL SEQUENCE
  Synthetic Construct
GKQSNK

SEQ ID NO: 14378 - protein, 6 aa, ARTIFICIAL SEQUENCE
  Synthetic Construct
GKQSQK

SEQ ID NO: 14379 - protein, 6 aa, ARTIFICIAL SEQUENCE
  Synthetic Construct
GKQSRK

SEQ ID NO: 14380 - protein, 6 aa, ARTIFICIAL SEQUENCE
  Synthetic Construct
GKQSSK

SEQ ID NO: 14381 - protein, 6 aa, ARTIFICIAL SEQUENCE
  Synthetic Construct
GKQSTK

SEQ ID NO: 14382 - protein, 6 aa, ARTIFICIAL SEQUENCE
  Synthetic Construct
GKQSYK

SEQ ID NO: 14383 - protein, 6 aa, ARTIFICIAL SEQUENCE
  Synthetic Construct
GKQTAK

SEQ ID NO: 14384 - protein, 6 aa, ARTIFICIAL SEQUENCE
  Synthetic Construct
GKQTDK

SEQ ID NO: 14385 - protein, 6 aa, ARTIFICIAL SEQUENCE
  Synthetic Construct
GKQTEK

SEQ ID NO: 14386 - protein, 6 aa, ARTIFICIAL SEQUENCE
  Synthetic Construct
GKQTFK

SEQ ID NO: 14387 - protein, 6 aa, ARTIFICIAL SEQUENCE
  Synthetic Construct
GKQTGK

SEQ ID NO: 14388 - protein, 6 aa, ARTIFICIAL SEQUENCE
  Synthetic Construct
GKQTHK

SEQ ID NO: 14389 - protein, 6 aa, ARTIFICIAL SEQUENCE
  Synthetic Construct
GKQTIK

SEQ ID NO: 14390 - protein, 6 aa, ARTIFICIAL SEQUENCE
  Synthetic Construct
GKQTLK

SEQ ID NO: 14391 - protein, 6 aa, ARTIFICIAL SEQUENCE
  Synthetic Construct
GKQTNK

SEQ ID NO: 14392 - protein, 6 aa, ARTIFICIAL SEQUENCE
  Synthetic Construct
GKQTQK

SEQ ID NO: 14393 - protein, 6 aa, ARTIFICIAL SEQUENCE
  Synthetic Construct
GKQTRK

SEQ ID NO: 14394 - protein, 6 aa, ARTIFICIAL SEQUENCE
  Synthetic Construct
GKQTSK

SEQ ID NO: 14395 - protein, 6 aa, ARTIFICIAL SEQUENCE
  Synthetic Construct
GKQTTK

SEQ ID NO: 14396 - protein, 6 aa, ARTIFICIAL SEQUENCE
  Synthetic Construct
GKQTYK

SEQ ID NO: 14397 - protein, 6 aa, ARTIFICIAL SEQUENCE
  Synthetic Construct
GKQYAK

SEQ ID NO: 14398 - protein, 6 aa, ARTIFICIAL SEQUENCE
  Synthetic Construct
GKQYDK

SEQ ID NO: 14399 - protein, 6 aa, ARTIFICIAL SEQUENCE
  Synthetic Construct
GKQYEK

SEQ ID NO: 14400 - protein, 6 aa, ARTIFICIAL SEQUENCE
  Synthetic Construct
GKQYFK

SEQ ID NO: 14401 - protein, 6 aa, ARTIFICIAL SEQUENCE
  Synthetic Construct
GKQYGK

SEQ ID NO: 14402 - protein, 6 aa, ARTIFICIAL SEQUENCE
  Synthetic Construct
GKQYHK

SEQ ID NO: 14403 - protein, 6 aa, ARTIFICIAL SEQUENCE
  Synthetic Construct
GKQYIK

SEQ ID NO: 14404 - protein, 6 aa, ARTIFICIAL SEQUENCE
  Synthetic Construct
GKQYLK

SEQ ID NO: 14405 - protein, 6 aa, ARTIFICIAL SEQUENCE
  Synthetic Construct
GKQYNK

SEQ ID NO: 14406 - protein, 6 aa, ARTIFICIAL SEQUENCE
  Synthetic Construct
GKQYQK

SEQ ID NO: 14407 - protein, 6 aa, ARTIFICIAL SEQUENCE
  Synthetic Construct
GKQYRK

SEQ ID NO: 14408 - protein, 6 aa, ARTIFICIAL SEQUENCE
  Synthetic Construct
GKQYSK

SEQ ID NO: 14409 - protein, 6 aa, ARTIFICIAL SEQUENCE
  Synthetic Construct
GKQYTK

SEQ ID NO: 14410 - protein, 6 aa, ARTIFICIAL SEQUENCE
  Synthetic Construct
GKQYYK

SEQ ID NO: 14411 - protein, 6 aa, ARTIFICIAL SEQUENCE
  Synthetic Construct
GKRAAK

SEQ ID NO: 14412 - protein, 6 aa, ARTIFICIAL SEQUENCE
  Synthetic Construct
GKRADK

SEQ ID NO: 14413 - protein, 6 aa, ARTIFICIAL SEQUENCE
  Synthetic Construct
GKRAEK

SEQ ID NO: 14414 - protein, 6 aa, ARTIFICIAL SEQUENCE
  Synthetic Construct
GKRAFK

SEQ ID NO: 14415 - protein, 6 aa, ARTIFICIAL SEQUENCE
  Synthetic Construct
GKRAGK

SEQ ID NO: 14416 - protein, 6 aa, ARTIFICIAL SEQUENCE
  Synthetic Construct
GKRAHK

SEQ ID NO: 14417 - protein, 6 aa, ARTIFICIAL SEQUENCE
  Synthetic Construct
GKRAIK

SEQ ID NO: 14418 - protein, 6 aa, ARTIFICIAL SEQUENCE
  Synthetic Construct
GKRALK

SEQ ID NO: 14419 - protein, 6 aa, ARTIFICIAL SEQUENCE
  Synthetic Construct
GKRANK

SEQ ID NO: 14420 - protein, 6 aa, ARTIFICIAL SEQUENCE
  Synthetic Construct
GKRAQK

SEQ ID NO: 14421 - protein, 6 aa, ARTIFICIAL SEQUENCE
  Synthetic Construct
GKRARK

SEQ ID NO: 14422 - protein, 6 aa, ARTIFICIAL SEQUENCE
  Synthetic Construct
GKRASK

SEQ ID NO: 14423 - protein, 6 aa, ARTIFICIAL SEQUENCE
  Synthetic Construct
GKRATK

SEQ ID NO: 14424 - protein, 6 aa, ARTIFICIAL SEQUENCE
  Synthetic Construct
GKRAYK

SEQ ID NO: 14425 - protein, 6 aa, ARTIFICIAL SEQUENCE
  Synthetic Construct
GKRDAK

SEQ ID NO: 14426 - protein, 6 aa, ARTIFICIAL SEQUENCE
  Synthetic Construct
GKRDDK

SEQ ID NO: 14427 - protein, 6 aa, ARTIFICIAL SEQUENCE
  Synthetic Construct
GKRDEK

SEQ ID NO: 14428 - protein, 6 aa, ARTIFICIAL SEQUENCE
  Synthetic Construct
GKRDFK

SEQ ID NO: 14429 - protein, 6 aa, ARTIFICIAL SEQUENCE
  Synthetic Construct
GKRDGK

SEQ ID NO: 14430 - protein, 6 aa, ARTIFICIAL SEQUENCE
  Synthetic Construct
GKRDHK

SEQ ID NO: 14431 - protein, 6 aa, ARTIFICIAL SEQUENCE
  Synthetic Construct
GKRDIK

SEQ ID NO: 14432 - protein, 6 aa, ARTIFICIAL SEQUENCE
  Synthetic Construct
GKRDLK

SEQ ID NO: 14433 - protein, 6 aa, ARTIFICIAL SEQUENCE
  Synthetic Construct
GKRDNK

SEQ ID NO: 14434 - protein, 6 aa, ARTIFICIAL SEQUENCE
  Synthetic Construct
GKRDQK

SEQ ID NO: 14435 - protein, 6 aa, ARTIFICIAL SEQUENCE
  Synthetic Construct
GKRDRK

SEQ ID NO: 14436 - protein, 6 aa, ARTIFICIAL SEQUENCE
  Synthetic Construct
GKRDSK

SEQ ID NO: 14437 - protein, 6 aa, ARTIFICIAL SEQUENCE
  Synthetic Construct
GKRDTK

SEQ ID NO: 14438 - protein, 6 aa, ARTIFICIAL SEQUENCE
  Synthetic Construct
GKRDYK

SEQ ID NO: 14439 - protein, 6 aa, ARTIFICIAL SEQUENCE
  Synthetic Construct
GKREAK

SEQ ID NO: 14440 - protein, 6 aa, ARTIFICIAL SEQUENCE
  Synthetic Construct
GKREDK

SEQ ID NO: 14441 - protein, 6 aa, ARTIFICIAL SEQUENCE
  Synthetic Construct
GKREEK

SEQ ID NO: 14442 - protein, 6 aa, ARTIFICIAL SEQUENCE
  Synthetic Construct
GKREFK

SEQ ID NO: 14443 - protein, 6 aa, ARTIFICIAL SEQUENCE
  Synthetic Construct
GKREGK

SEQ ID NO: 14444 - protein, 6 aa, ARTIFICIAL SEQUENCE
  Synthetic Construct
GKREHK

SEQ ID NO: 14445 - protein, 6 aa, ARTIFICIAL SEQUENCE
  Synthetic Construct
GKREIK

SEQ ID NO: 14446 - protein, 6 aa, ARTIFICIAL SEQUENCE
  Synthetic Construct
GKRELK

SEQ ID NO: 14447 - protein, 6 aa, ARTIFICIAL SEQUENCE
  Synthetic Construct
GKRENK

SEQ ID NO: 14448 - protein, 6 aa, ARTIFICIAL SEQUENCE
  Synthetic Construct
GKREQK

SEQ ID NO: 14449 - protein, 6 aa, ARTIFICIAL SEQUENCE
  Synthetic Construct
GKRERK

SEQ ID NO: 14450 - protein, 6 aa, ARTIFICIAL SEQUENCE
  Synthetic Construct
GKRESK

SEQ ID NO: 14451 - protein, 6 aa, ARTIFICIAL SEQUENCE
  Synthetic Construct
GKRETK

SEQ ID NO: 14452 - protein, 6 aa, ARTIFICIAL SEQUENCE
  Synthetic Construct
GKREYK

SEQ ID NO: 14453 - protein, 6 aa, ARTIFICIAL SEQUENCE
  Synthetic Construct
GKRFAK

SEQ ID NO: 14454 - protein, 6 aa, ARTIFICIAL SEQUENCE
  Synthetic Construct
GKRFDK

SEQ ID NO: 14455 - protein, 6 aa, ARTIFICIAL SEQUENCE
  Synthetic Construct
GKRFEK

SEQ ID NO: 14456 - protein, 6 aa, ARTIFICIAL SEQUENCE
  Synthetic Construct
GKRFFK

SEQ ID NO: 14457 - protein, 6 aa, ARTIFICIAL SEQUENCE
  Synthetic Construct
GKRFGK

SEQ ID NO: 14458 - protein, 6 aa, ARTIFICIAL SEQUENCE
  Synthetic Construct
GKRFHK

SEQ ID NO: 14459 - protein, 6 aa, ARTIFICIAL SEQUENCE
  Synthetic Construct
GKRFIK

SEQ ID NO: 14460 - protein, 6 aa, ARTIFICIAL SEQUENCE
  Synthetic Construct
GKRFLK

SEQ ID NO: 14461 - protein, 6 aa, ARTIFICIAL SEQUENCE
  Synthetic Construct
GKRFNK

SEQ ID NO: 14462 - protein, 6 aa, ARTIFICIAL SEQUENCE
  Synthetic Construct
GKRFQK

SEQ ID NO: 14463 - protein, 6 aa, ARTIFICIAL SEQUENCE
  Synthetic Construct
GKRFRK

SEQ ID NO: 14464 - protein, 6 aa, ARTIFICIAL SEQUENCE
  Synthetic Construct
GKRFSK

SEQ ID NO: 14465 - protein, 6 aa, ARTIFICIAL SEQUENCE
  Synthetic Construct
GKRFTK

SEQ ID NO: 14466 - protein, 6 aa, ARTIFICIAL SEQUENCE
  Synthetic Construct
GKRFYK

SEQ ID NO: 14467 - protein, 6 aa, ARTIFICIAL SEQUENCE
  Synthetic Construct
GKRGAK

SEQ ID NO: 14468 - protein, 6 aa, ARTIFICIAL SEQUENCE
  Synthetic Construct
GKRGDK

SEQ ID NO: 14469 - protein, 6 aa, ARTIFICIAL SEQUENCE
  Synthetic Construct
GKRGEK

SEQ ID NO: 14470 - protein, 6 aa, ARTIFICIAL SEQUENCE
  Synthetic Construct
GKRGFK

SEQ ID NO: 14471 - protein, 6 aa, ARTIFICIAL SEQUENCE
  Synthetic Construct
GKRGGK

SEQ ID NO: 14472 - protein, 6 aa, ARTIFICIAL SEQUENCE
  Synthetic Construct
GKRGHK

SEQ ID NO: 14473 - protein, 6 aa, ARTIFICIAL SEQUENCE
  Synthetic Construct
GKRGIK

SEQ ID NO: 14474 - protein, 6 aa, ARTIFICIAL SEQUENCE
  Synthetic Construct
GKRGLK

SEQ ID NO: 14475 - protein, 6 aa, ARTIFICIAL SEQUENCE
  Synthetic Construct
GKRGNK

SEQ ID NO: 14476 - protein, 6 aa, ARTIFICIAL SEQUENCE
  Synthetic Construct
GKRGQK

SEQ ID NO: 14477 - protein, 6 aa, ARTIFICIAL SEQUENCE
  Synthetic Construct
GKRGRK

SEQ ID NO: 14478 - protein, 6 aa, ARTIFICIAL SEQUENCE
  Synthetic Construct
GKRGSK

SEQ ID NO: 14479 - protein, 6 aa, ARTIFICIAL SEQUENCE
  Synthetic Construct
GKRGTK

SEQ ID NO: 14480 - protein, 6 aa, ARTIFICIAL SEQUENCE
  Synthetic Construct
GKRGYK

SEQ ID NO: 14481 - protein, 6 aa, ARTIFICIAL SEQUENCE
  Synthetic Construct
GKRHAK

SEQ ID NO: 14482 - protein, 6 aa, ARTIFICIAL SEQUENCE
  Synthetic Construct
GKRHDK

SEQ ID NO: 14483 - protein, 6 aa, ARTIFICIAL SEQUENCE
  Synthetic Construct
GKRHEK

SEQ ID NO: 14484 - protein, 6 aa, ARTIFICIAL SEQUENCE
  Synthetic Construct
GKRHFK

SEQ ID NO: 14485 - protein, 6 aa, ARTIFICIAL SEQUENCE
  Synthetic Construct
GKRHGK

SEQ ID NO: 14486 - protein, 6 aa, ARTIFICIAL SEQUENCE
  Synthetic Construct
GKRHHK

SEQ ID NO: 14487 - protein, 6 aa, ARTIFICIAL SEQUENCE
  Synthetic Construct
GKRHIK

SEQ ID NO: 14488 - protein, 6 aa, ARTIFICIAL SEQUENCE
  Synthetic Construct
GKRHLK

SEQ ID NO: 14489 - protein, 6 aa, ARTIFICIAL SEQUENCE
  Synthetic Construct
GKRHNK

SEQ ID NO: 14490 - protein, 6 aa, ARTIFICIAL SEQUENCE
  Synthetic Construct
GKRHQK

SEQ ID NO: 14491 - protein, 6 aa, ARTIFICIAL SEQUENCE
  Synthetic Construct
GKRHRK

SEQ ID NO: 14492 - protein, 6 aa, ARTIFICIAL SEQUENCE
  Synthetic Construct
GKRHSK

SEQ ID NO: 14493 - protein, 6 aa, ARTIFICIAL SEQUENCE
  Synthetic Construct
GKRHTK

SEQ ID NO: 14494 - protein, 6 aa, ARTIFICIAL SEQUENCE
  Synthetic Construct
GKRHYK

SEQ ID NO: 14495 - protein, 6 aa, ARTIFICIAL SEQUENCE
  Synthetic Construct
GKRIAK

SEQ ID NO: 14496 - protein, 6 aa, ARTIFICIAL SEQUENCE
  Synthetic Construct
GKRIDK

SEQ ID NO: 14497 - protein, 6 aa, ARTIFICIAL SEQUENCE
  Synthetic Construct
GKRIEK

SEQ ID NO: 14498 - protein, 6 aa, ARTIFICIAL SEQUENCE
  Synthetic Construct
GKRIFK

SEQ ID NO: 14499 - protein, 6 aa, ARTIFICIAL SEQUENCE
  Synthetic Construct
GKRIGK

SEQ ID NO: 14500 - protein, 6 aa, ARTIFICIAL SEQUENCE
  Synthetic Construct
GKRIHK

SEQ ID NO: 14501 - protein, 6 aa, ARTIFICIAL SEQUENCE
  Synthetic Construct
GKRIIK

SEQ ID NO: 14502 - protein, 6 aa, ARTIFICIAL SEQUENCE
  Synthetic Construct
GKRILK

SEQ ID NO: 14503 - protein, 6 aa, ARTIFICIAL SEQUENCE
  Synthetic Construct
GKRINK

SEQ ID NO: 14504 - protein, 6 aa, ARTIFICIAL SEQUENCE
  Synthetic Construct
GKRIQK

SEQ ID NO: 14505 - protein, 6 aa, ARTIFICIAL SEQUENCE
  Synthetic Construct
GKRIRK

SEQ ID NO: 14506 - protein, 6 aa, ARTIFICIAL SEQUENCE
  Synthetic Construct
GKRISK

SEQ ID NO: 14507 - protein, 6 aa, ARTIFICIAL SEQUENCE
  Synthetic Construct
GKRITK

SEQ ID NO: 14508 - protein, 6 aa, ARTIFICIAL SEQUENCE
  Synthetic Construct
GKRIYK

SEQ ID NO: 14509 - protein, 6 aa, ARTIFICIAL SEQUENCE
  Synthetic Construct
GKRLAK

SEQ ID NO: 14510 - protein, 6 aa, ARTIFICIAL SEQUENCE
  Synthetic Construct
GKRLDK

SEQ ID NO: 14511 - protein, 6 aa, ARTIFICIAL SEQUENCE
  Synthetic Construct
GKRLEK

SEQ ID NO: 14512 - protein, 6 aa, ARTIFICIAL SEQUENCE
  Synthetic Construct
GKRLFK

SEQ ID NO: 14513 - protein, 6 aa, ARTIFICIAL SEQUENCE
  Synthetic Construct
GKRLGK

SEQ ID NO: 14514 - protein, 6 aa, ARTIFICIAL SEQUENCE
  Synthetic Construct
GKRLHK

SEQ ID NO: 14515 - protein, 6 aa, ARTIFICIAL SEQUENCE
  Synthetic Construct
GKRLIK

SEQ ID NO: 14516 - protein, 6 aa, ARTIFICIAL SEQUENCE
  Synthetic Construct
GKRLLK

SEQ ID NO: 14517 - protein, 6 aa, ARTIFICIAL SEQUENCE
  Synthetic Construct
GKRLNK

SEQ ID NO: 14518 - protein, 6 aa, ARTIFICIAL SEQUENCE
  Synthetic Construct
GKRLQK

SEQ ID NO: 14519 - protein, 6 aa, ARTIFICIAL SEQUENCE
  Synthetic Construct
GKRLRK

SEQ ID NO: 14520 - protein, 6 aa, ARTIFICIAL SEQUENCE
  Synthetic Construct
GKRLSK

SEQ ID NO: 14521 - protein, 6 aa, ARTIFICIAL SEQUENCE
  Synthetic Construct
GKRLTK

SEQ ID NO: 14522 - protein, 6 aa, ARTIFICIAL SEQUENCE
  Synthetic Construct
GKRLYK

SEQ ID NO: 14523 - protein, 6 aa, ARTIFICIAL SEQUENCE
  Synthetic Construct
GKRNAK

SEQ ID NO: 14524 - protein, 6 aa, ARTIFICIAL SEQUENCE
  Synthetic Construct
GKRNDK

SEQ ID NO: 14525 - protein, 6 aa, ARTIFICIAL SEQUENCE
  Synthetic Construct
GKRNEK

SEQ ID NO: 14526 - protein, 6 aa, ARTIFICIAL SEQUENCE
  Synthetic Construct
GKRNFK

SEQ ID NO: 14527 - protein, 6 aa, ARTIFICIAL SEQUENCE
  Synthetic Construct
GKRNGK

SEQ ID NO: 14528 - protein, 6 aa, ARTIFICIAL SEQUENCE
  Synthetic Construct
GKRNHK

SEQ ID NO: 14529 - protein, 6 aa, ARTIFICIAL SEQUENCE
  Synthetic Construct
GKRNIK

SEQ ID NO: 14530 - protein, 6 aa, ARTIFICIAL SEQUENCE
  Synthetic Construct
GKRNLK

SEQ ID NO: 14531 - protein, 6 aa, ARTIFICIAL SEQUENCE
  Synthetic Construct
GKRNNK

SEQ ID NO: 14532 - protein, 6 aa, ARTIFICIAL SEQUENCE
  Synthetic Construct
GKRNQK

SEQ ID NO: 14533 - protein, 6 aa, ARTIFICIAL SEQUENCE
  Synthetic Construct
GKRNRK

SEQ ID NO: 14534 - protein, 6 aa, ARTIFICIAL SEQUENCE
  Synthetic Construct
GKRNSK

SEQ ID NO: 14535 - protein, 6 aa, ARTIFICIAL SEQUENCE
  Synthetic Construct
GKRNTK

SEQ ID NO: 14536 - protein, 6 aa, ARTIFICIAL SEQUENCE
  Synthetic Construct
GKRNYK

SEQ ID NO: 14537 - protein, 6 aa, ARTIFICIAL SEQUENCE
  Synthetic Construct
GKRQAK

SEQ ID NO: 14538 - protein, 6 aa, ARTIFICIAL SEQUENCE
  Synthetic Construct
GKRQDK

SEQ ID NO: 14539 - protein, 6 aa, ARTIFICIAL SEQUENCE
  Synthetic Construct
GKRQEK

SEQ ID NO: 14540 - protein, 6 aa, ARTIFICIAL SEQUENCE
  Synthetic Construct
GKRQFK

SEQ ID NO: 14541 - protein, 6 aa, ARTIFICIAL SEQUENCE
  Synthetic Construct
GKRQGK

SEQ ID NO: 14542 - protein, 6 aa, ARTIFICIAL SEQUENCE
  Synthetic Construct
GKRQHK

SEQ ID NO: 14543 - protein, 6 aa, ARTIFICIAL SEQUENCE
  Synthetic Construct
GKRQIK

SEQ ID NO: 14544 - protein, 6 aa, ARTIFICIAL SEQUENCE
  Synthetic Construct
GKRQLK

SEQ ID NO: 14545 - protein, 6 aa, ARTIFICIAL SEQUENCE
  Synthetic Construct
GKRQNK

SEQ ID NO: 14546 - protein, 6 aa, ARTIFICIAL SEQUENCE
  Synthetic Construct
GKRQQK

SEQ ID NO: 14547 - protein, 6 aa, ARTIFICIAL SEQUENCE
  Synthetic Construct
GKRQRK

SEQ ID NO: 14548 - protein, 6 aa, ARTIFICIAL SEQUENCE
  Synthetic Construct
GKRQSK

SEQ ID NO: 14549 - protein, 6 aa, ARTIFICIAL SEQUENCE
  Synthetic Construct
GKRQTK

SEQ ID NO: 14550 - protein, 6 aa, ARTIFICIAL SEQUENCE
  Synthetic Construct
GKRQYK

SEQ ID NO: 14551 - protein, 6 aa, ARTIFICIAL SEQUENCE
  Synthetic Construct
GKRRAK

SEQ ID NO: 14552 - protein, 6 aa, ARTIFICIAL SEQUENCE
  Synthetic Construct
GKRRDK

SEQ ID NO: 14553 - protein, 6 aa, ARTIFICIAL SEQUENCE
  Synthetic Construct
GKRREK

SEQ ID NO: 14554 - protein, 6 aa, ARTIFICIAL SEQUENCE
  Synthetic Construct
GKRRFK

SEQ ID NO: 14555 - protein, 6 aa, ARTIFICIAL SEQUENCE
  Synthetic Construct
GKRRGK

SEQ ID NO: 14556 - protein, 6 aa, ARTIFICIAL SEQUENCE
  Synthetic Construct
GKRRHK

SEQ ID NO: 14557 - protein, 6 aa, ARTIFICIAL SEQUENCE
  Synthetic Construct
GKRRIK

SEQ ID NO: 14558 - protein, 6 aa, ARTIFICIAL SEQUENCE
  Synthetic Construct
GKRRLK

SEQ ID NO: 14559 - protein, 6 aa, ARTIFICIAL SEQUENCE
  Synthetic Construct
GKRRNK

SEQ ID NO: 14560 - protein, 6 aa, ARTIFICIAL SEQUENCE
  Synthetic Construct
GKRRQK

SEQ ID NO: 14561 - protein, 6 aa, ARTIFICIAL SEQUENCE
  Synthetic Construct
GKRRRK

SEQ ID NO: 14562 - protein, 6 aa, ARTIFICIAL SEQUENCE
  Synthetic Construct
GKRRSK

SEQ ID NO: 14563 - protein, 6 aa, ARTIFICIAL SEQUENCE
  Synthetic Construct
GKRRTK

SEQ ID NO: 14564 - protein, 6 aa, ARTIFICIAL SEQUENCE
  Synthetic Construct
GKRRYK

SEQ ID NO: 14565 - protein, 6 aa, ARTIFICIAL SEQUENCE
  Synthetic Construct
GKRSAK

SEQ ID NO: 14566 - protein, 6 aa, ARTIFICIAL SEQUENCE
  Synthetic Construct
GKRSDK

SEQ ID NO: 14567 - protein, 6 aa, ARTIFICIAL SEQUENCE
  Synthetic Construct
GKRSEK

SEQ ID NO: 14568 - protein, 6 aa, ARTIFICIAL SEQUENCE
  Synthetic Construct
GKRSFK

SEQ ID NO: 14569 - protein, 6 aa, ARTIFICIAL SEQUENCE
  Synthetic Construct
GKRSGK

SEQ ID NO: 14570 - protein, 6 aa, ARTIFICIAL SEQUENCE
  Synthetic Construct
GKRSHK

SEQ ID NO: 14571 - protein, 6 aa, ARTIFICIAL SEQUENCE
  Synthetic Construct
GKRSIK

SEQ ID NO: 14572 - protein, 6 aa, ARTIFICIAL SEQUENCE
  Synthetic Construct
GKRSLK

SEQ ID NO: 14573 - protein, 6 aa, ARTIFICIAL SEQUENCE
  Synthetic Construct
GKRSNK

SEQ ID NO: 14574 - protein, 6 aa, ARTIFICIAL SEQUENCE
  Synthetic Construct
GKRSQK

SEQ ID NO: 14575 - protein, 6 aa, ARTIFICIAL SEQUENCE
  Synthetic Construct
GKRSRK

SEQ ID NO: 14576 - protein, 6 aa, ARTIFICIAL SEQUENCE
  Synthetic Construct
GKRSSK

SEQ ID NO: 14577 - protein, 6 aa, ARTIFICIAL SEQUENCE
  Synthetic Construct
GKRSTK

SEQ ID NO: 14578 - protein, 6 aa, ARTIFICIAL SEQUENCE
  Synthetic Construct
GKRSYK

SEQ ID NO: 14579 - protein, 6 aa, ARTIFICIAL SEQUENCE
  Synthetic Construct
GKRTAK

SEQ ID NO: 14580 - protein, 6 aa, ARTIFICIAL SEQUENCE
  Synthetic Construct
GKRTDK

SEQ ID NO: 14581 - protein, 6 aa, ARTIFICIAL SEQUENCE
  Synthetic Construct
GKRTEK

SEQ ID NO: 14582 - protein, 6 aa, ARTIFICIAL SEQUENCE
  Synthetic Construct
GKRTFK

SEQ ID NO: 14583 - protein, 6 aa, ARTIFICIAL SEQUENCE
  Synthetic Construct
GKRTGK

SEQ ID NO: 14584 - protein, 6 aa, ARTIFICIAL SEQUENCE
  Synthetic Construct
GKRTHK

SEQ ID NO: 14585 - protein, 6 aa, ARTIFICIAL SEQUENCE
  Synthetic Construct
GKRTIK

SEQ ID NO: 14586 - protein, 6 aa, ARTIFICIAL SEQUENCE
  Synthetic Construct
GKRTLK

SEQ ID NO: 14587 - protein, 6 aa, ARTIFICIAL SEQUENCE
  Synthetic Construct
GKRTNK

SEQ ID NO: 14588 - protein, 6 aa, ARTIFICIAL SEQUENCE
  Synthetic Construct
GKRTQK

SEQ ID NO: 14589 - protein, 6 aa, ARTIFICIAL SEQUENCE
  Synthetic Construct
GKRTRK

SEQ ID NO: 14590 - protein, 6 aa, ARTIFICIAL SEQUENCE
  Synthetic Construct
GKRTSK

SEQ ID NO: 14591 - protein, 6 aa, ARTIFICIAL SEQUENCE
  Synthetic Construct
GKRTTK

SEQ ID NO: 14592 - protein, 6 aa, ARTIFICIAL SEQUENCE
  Synthetic Construct
GKRTYK

SEQ ID NO: 14593 - protein, 6 aa, ARTIFICIAL SEQUENCE
  Synthetic Construct
GKRYAK

SEQ ID NO: 14594 - protein, 6 aa, ARTIFICIAL SEQUENCE
  Synthetic Construct
GKRYDK

SEQ ID NO: 14595 - protein, 6 aa, ARTIFICIAL SEQUENCE
  Synthetic Construct
GKRYEK

SEQ ID NO: 14596 - protein, 6 aa, ARTIFICIAL SEQUENCE
  Synthetic Construct
GKRYFK

SEQ ID NO: 14597 - protein, 6 aa, ARTIFICIAL SEQUENCE
  Synthetic Construct
GKRYGK

SEQ ID NO: 14598 - protein, 6 aa, ARTIFICIAL SEQUENCE
  Synthetic Construct
GKRYHK

SEQ ID NO: 14599 - protein, 6 aa, ARTIFICIAL SEQUENCE
  Synthetic Construct
GKRYIK

SEQ ID NO: 14600 - protein, 6 aa, ARTIFICIAL SEQUENCE
  Synthetic Construct
GKRYLK

SEQ ID NO: 14601 - protein, 6 aa, ARTIFICIAL SEQUENCE
  Synthetic Construct
GKRYNK

SEQ ID NO: 14602 - protein, 6 aa, ARTIFICIAL SEQUENCE
  Synthetic Construct
GKRYQK

SEQ ID NO: 14603 - protein, 6 aa, ARTIFICIAL SEQUENCE
  Synthetic Construct
GKRYRK

SEQ ID NO: 14604 - protein, 6 aa, ARTIFICIAL SEQUENCE
  Synthetic Construct
GKRYSK

SEQ ID NO: 14605 - protein, 6 aa, ARTIFICIAL SEQUENCE
  Synthetic Construct
GKRYTK

SEQ ID NO: 14606 - protein, 6 aa, ARTIFICIAL SEQUENCE
  Synthetic Construct
GKRYYK

SEQ ID NO: 14607 - protein, 6 aa, ARTIFICIAL SEQUENCE
  Synthetic Construct
GKSAAK

SEQ ID NO: 14608 - protein, 6 aa, ARTIFICIAL SEQUENCE
  Synthetic Construct
GKSADK

SEQ ID NO: 14609 - protein, 6 aa, ARTIFICIAL SEQUENCE
  Synthetic Construct
GKSAEK

SEQ ID NO: 14610 - protein, 6 aa, ARTIFICIAL SEQUENCE
  Synthetic Construct
GKSAFK

SEQ ID NO: 14611 - protein, 6 aa, ARTIFICIAL SEQUENCE
  Synthetic Construct
GKSAGK

SEQ ID NO: 14612 - protein, 6 aa, ARTIFICIAL SEQUENCE
  Synthetic Construct
GKSAHK

SEQ ID NO: 14613 - protein, 6 aa, ARTIFICIAL SEQUENCE
  Synthetic Construct
GKSAIK

SEQ ID NO: 14614 - protein, 6 aa, ARTIFICIAL SEQUENCE
  Synthetic Construct
GKSALK

SEQ ID NO: 14615 - protein, 6 aa, ARTIFICIAL SEQUENCE
  Synthetic Construct
GKSANK

SEQ ID NO: 14616 - protein, 6 aa, ARTIFICIAL SEQUENCE
  Synthetic Construct
GKSAQK

SEQ ID NO: 14617 - protein, 6 aa, ARTIFICIAL SEQUENCE
  Synthetic Construct
GKSARK

SEQ ID NO: 14618 - protein, 6 aa, ARTIFICIAL SEQUENCE
  Synthetic Construct
GKSASK

SEQ ID NO: 14619 - protein, 6 aa, ARTIFICIAL SEQUENCE
  Synthetic Construct
GKSATK

SEQ ID NO: 14620 - protein, 6 aa, ARTIFICIAL SEQUENCE
  Synthetic Construct
GKSAYK

SEQ ID NO: 14621 - protein, 6 aa, ARTIFICIAL SEQUENCE
  Synthetic Construct
GKSDAK

SEQ ID NO: 14622 - protein, 6 aa, ARTIFICIAL SEQUENCE
  Synthetic Construct
GKSDDK

SEQ ID NO: 14623 - protein, 6 aa, ARTIFICIAL SEQUENCE
  Synthetic Construct
GKSDEK

SEQ ID NO: 14624 - protein, 6 aa, ARTIFICIAL SEQUENCE
  Synthetic Construct
GKSDFK

SEQ ID NO: 14625 - protein, 6 aa, ARTIFICIAL SEQUENCE
  Synthetic Construct
GKSDGK

SEQ ID NO: 14626 - protein, 6 aa, ARTIFICIAL SEQUENCE
  Synthetic Construct
GKSDHK

SEQ ID NO: 14627 - protein, 6 aa, ARTIFICIAL SEQUENCE
  Synthetic Construct
GKSDIK

SEQ ID NO: 14628 - protein, 6 aa, ARTIFICIAL SEQUENCE
  Synthetic Construct
GKSDLK

SEQ ID NO: 14629 - protein, 6 aa, ARTIFICIAL SEQUENCE
  Synthetic Construct
GKSDNK

SEQ ID NO: 14630 - protein, 6 aa, ARTIFICIAL SEQUENCE
  Synthetic Construct
GKSDQK

SEQ ID NO: 14631 - protein, 6 aa, ARTIFICIAL SEQUENCE
  Synthetic Construct
GKSDRK

SEQ ID NO: 14632 - protein, 6 aa, ARTIFICIAL SEQUENCE
  Synthetic Construct
GKSDSK

SEQ ID NO: 14633 - protein, 6 aa, ARTIFICIAL SEQUENCE
  Synthetic Construct
GKSDTK

SEQ ID NO: 14634 - protein, 6 aa, ARTIFICIAL SEQUENCE
  Synthetic Construct
GKSDYK

SEQ ID NO: 14635 - protein, 6 aa, ARTIFICIAL SEQUENCE
  Synthetic Construct
GKSEAK

SEQ ID NO: 14636 - protein, 6 aa, ARTIFICIAL SEQUENCE
  Synthetic Construct
GKSEDK

SEQ ID NO: 14637 - protein, 6 aa, ARTIFICIAL SEQUENCE
  Synthetic Construct
GKSEEK

SEQ ID NO: 14638 - protein, 6 aa, ARTIFICIAL SEQUENCE
  Synthetic Construct
GKSEFK

SEQ ID NO: 14639 - protein, 6 aa, ARTIFICIAL SEQUENCE
  Synthetic Construct
GKSEGK

SEQ ID NO: 14640 - protein, 6 aa, ARTIFICIAL SEQUENCE
  Synthetic Construct
GKSEHK

SEQ ID NO: 14641 - protein, 6 aa, ARTIFICIAL SEQUENCE
  Synthetic Construct
GKSEIK

SEQ ID NO: 14642 - protein, 6 aa, ARTIFICIAL SEQUENCE
  Synthetic Construct
GKSELK

SEQ ID NO: 14643 - protein, 6 aa, ARTIFICIAL SEQUENCE
  Synthetic Construct
GKSENK

SEQ ID NO: 14644 - protein, 6 aa, ARTIFICIAL SEQUENCE
  Synthetic Construct
GKSEQK

SEQ ID NO: 14645 - protein, 6 aa, ARTIFICIAL SEQUENCE
  Synthetic Construct
GKSERK

SEQ ID NO: 14646 - protein, 6 aa, ARTIFICIAL SEQUENCE
  Synthetic Construct
GKSESK

SEQ ID NO: 14647 - protein, 6 aa, ARTIFICIAL SEQUENCE
  Synthetic Construct
GKSETK

SEQ ID NO: 14648 - protein, 6 aa, ARTIFICIAL SEQUENCE
  Synthetic Construct
GKSEYK

SEQ ID NO: 14649 - protein, 6 aa, ARTIFICIAL SEQUENCE
  Synthetic Construct
GKSFAK

SEQ ID NO: 14650 - protein, 6 aa, ARTIFICIAL SEQUENCE
  Synthetic Construct
GKSFDK

SEQ ID NO: 14651 - protein, 6 aa, ARTIFICIAL SEQUENCE
  Synthetic Construct
GKSFEK

SEQ ID NO: 14652 - protein, 6 aa, ARTIFICIAL SEQUENCE
  Synthetic Construct
GKSFFK

SEQ ID NO: 14653 - protein, 6 aa, ARTIFICIAL SEQUENCE
  Synthetic Construct
GKSFGK

SEQ ID NO: 14654 - protein, 6 aa, ARTIFICIAL SEQUENCE
  Synthetic Construct
GKSFHK

SEQ ID NO: 14655 - protein, 6 aa, ARTIFICIAL SEQUENCE
  Synthetic Construct
GKSFIK

SEQ ID NO: 14656 - protein, 6 aa, ARTIFICIAL SEQUENCE
  Synthetic Construct
GKSFLK

SEQ ID NO: 14657 - protein, 6 aa, ARTIFICIAL SEQUENCE
  Synthetic Construct
GKSFNK

SEQ ID NO: 14658 - protein, 6 aa, ARTIFICIAL SEQUENCE
  Synthetic Construct
GKSFQK

SEQ ID NO: 14659 - protein, 6 aa, ARTIFICIAL SEQUENCE
  Synthetic Construct
GKSFRK

SEQ ID NO: 14660 - protein, 6 aa, ARTIFICIAL SEQUENCE
  Synthetic Construct
GKSFSK

SEQ ID NO: 14661 - protein, 6 aa, ARTIFICIAL SEQUENCE
  Synthetic Construct
GKSFTK

SEQ ID NO: 14662 - protein, 6 aa, ARTIFICIAL SEQUENCE
  Synthetic Construct
GKSFYK

SEQ ID NO: 14663 - protein, 6 aa, ARTIFICIAL SEQUENCE
  Synthetic Construct
GKSGAK

SEQ ID NO: 14664 - protein, 6 aa, ARTIFICIAL SEQUENCE
  Synthetic Construct
GKSGDK

SEQ ID NO: 14665 - protein, 6 aa, ARTIFICIAL SEQUENCE
  Synthetic Construct
GKSGEK

SEQ ID NO: 14666 - protein, 6 aa, ARTIFICIAL SEQUENCE
  Synthetic Construct
GKSGFK

SEQ ID NO: 14667 - protein, 6 aa, ARTIFICIAL SEQUENCE
  Synthetic Construct
GKSGGK

SEQ ID NO: 14668 - protein, 6 aa, ARTIFICIAL SEQUENCE
  Synthetic Construct
GKSGHK

SEQ ID NO: 14669 - protein, 6 aa, ARTIFICIAL SEQUENCE
  Synthetic Construct
GKSGIK

SEQ ID NO: 14670 - protein, 6 aa, ARTIFICIAL SEQUENCE
  Synthetic Construct
GKSGLK

SEQ ID NO: 14671 - protein, 6 aa, ARTIFICIAL SEQUENCE
  Synthetic Construct
GKSGNK

SEQ ID NO: 14672 - protein, 6 aa, ARTIFICIAL SEQUENCE
  Synthetic Construct
GKSGQK

SEQ ID NO: 14673 - protein, 6 aa, ARTIFICIAL SEQUENCE
  Synthetic Construct
GKSGRK

SEQ ID NO: 14674 - protein, 6 aa, ARTIFICIAL SEQUENCE
  Synthetic Construct
GKSGSK

SEQ ID NO: 14675 - protein, 6 aa, ARTIFICIAL SEQUENCE
  Synthetic Construct
GKSGTK

SEQ ID NO: 14676 - protein, 6 aa, ARTIFICIAL SEQUENCE
  Synthetic Construct
GKSGYK

SEQ ID NO: 14677 - protein, 6 aa, ARTIFICIAL SEQUENCE
  Synthetic Construct
GKSHAK

SEQ ID NO: 14678 - protein, 6 aa, ARTIFICIAL SEQUENCE
  Synthetic Construct
GKSHDK

SEQ ID NO: 14679 - protein, 6 aa, ARTIFICIAL SEQUENCE
  Synthetic Construct
GKSHEK

SEQ ID NO: 14680 - protein, 6 aa, ARTIFICIAL SEQUENCE
  Synthetic Construct
GKSHFK

SEQ ID NO: 14681 - protein, 6 aa, ARTIFICIAL SEQUENCE
  Synthetic Construct
GKSHGK

SEQ ID NO: 14682 - protein, 6 aa, ARTIFICIAL SEQUENCE
  Synthetic Construct
GKSHHK

SEQ ID NO: 14683 - protein, 6 aa, ARTIFICIAL SEQUENCE
  Synthetic Construct
GKSHIK

SEQ ID NO: 14684 - protein, 6 aa, ARTIFICIAL SEQUENCE
  Synthetic Construct
GKSHLK

SEQ ID NO: 14685 - protein, 6 aa, ARTIFICIAL SEQUENCE
  Synthetic Construct
GKSHNK

SEQ ID NO: 14686 - protein, 6 aa, ARTIFICIAL SEQUENCE
  Synthetic Construct
GKSHQK

SEQ ID NO: 14687 - protein, 6 aa, ARTIFICIAL SEQUENCE
  Synthetic Construct
GKSHRK

SEQ ID NO: 14688 - protein, 6 aa, ARTIFICIAL SEQUENCE
  Synthetic Construct
GKSHSK

SEQ ID NO: 14689 - protein, 6 aa, ARTIFICIAL SEQUENCE
  Synthetic Construct
GKSHTK

SEQ ID NO: 14690 - protein, 6 aa, ARTIFICIAL SEQUENCE
  Synthetic Construct
GKSHYK

SEQ ID NO: 14691 - protein, 6 aa, ARTIFICIAL SEQUENCE
  Synthetic Construct
GKSIAK

SEQ ID NO: 14692 - protein, 6 aa, ARTIFICIAL SEQUENCE
  Synthetic Construct
GKSIDK

SEQ ID NO: 14693 - protein, 6 aa, ARTIFICIAL SEQUENCE
  Synthetic Construct
GKSIEK

SEQ ID NO: 14694 - protein, 6 aa, ARTIFICIAL SEQUENCE
  Synthetic Construct
GKSIFK

SEQ ID NO: 14695 - protein, 6 aa, ARTIFICIAL SEQUENCE
  Synthetic Construct
GKSIGK

SEQ ID NO: 14696 - protein, 6 aa, ARTIFICIAL SEQUENCE
  Synthetic Construct
GKSIHK

SEQ ID NO: 14697 - protein, 6 aa, ARTIFICIAL SEQUENCE
  Synthetic Construct
GKSIIK

SEQ ID NO: 14698 - protein, 6 aa, ARTIFICIAL SEQUENCE
  Synthetic Construct
GKSILK

SEQ ID NO: 14699 - protein, 6 aa, ARTIFICIAL SEQUENCE
  Synthetic Construct
GKSINK

SEQ ID NO: 14700 - protein, 6 aa, ARTIFICIAL SEQUENCE
  Synthetic Construct
GKSIQK

SEQ ID NO: 14701 - protein, 6 aa, ARTIFICIAL SEQUENCE
  Synthetic Construct
GKSIRK

SEQ ID NO: 14702 - protein, 6 aa, ARTIFICIAL SEQUENCE
  Synthetic Construct
GKSISK

SEQ ID NO: 14703 - protein, 6 aa, ARTIFICIAL SEQUENCE
  Synthetic Construct
GKSITK

SEQ ID NO: 14704 - protein, 6 aa, ARTIFICIAL SEQUENCE
  Synthetic Construct
GKSIYK

SEQ ID NO: 14705 - protein, 6 aa, ARTIFICIAL SEQUENCE
  Synthetic Construct
GKSLAK

SEQ ID NO: 14706 - protein, 6 aa, ARTIFICIAL SEQUENCE
  Synthetic Construct
GKSLDK

SEQ ID NO: 14707 - protein, 6 aa, ARTIFICIAL SEQUENCE
  Synthetic Construct
GKSLEK

SEQ ID NO: 14708 - protein, 6 aa, ARTIFICIAL SEQUENCE
  Synthetic Construct
GKSLFK

SEQ ID NO: 14709 - protein, 6 aa, ARTIFICIAL SEQUENCE
  Synthetic Construct
GKSLGK

SEQ ID NO: 14710 - protein, 6 aa, ARTIFICIAL SEQUENCE
  Synthetic Construct
GKSLHK

SEQ ID NO: 14711 - protein, 6 aa, ARTIFICIAL SEQUENCE
  Synthetic Construct
GKSLIK

SEQ ID NO: 14712 - protein, 6 aa, ARTIFICIAL SEQUENCE
  Synthetic Construct
GKSLLK

SEQ ID NO: 14713 - protein, 6 aa, ARTIFICIAL SEQUENCE
  Synthetic Construct
GKSLNK

SEQ ID NO: 14714 - protein, 6 aa, ARTIFICIAL SEQUENCE
  Synthetic Construct
GKSLQK

SEQ ID NO: 14715 - protein, 6 aa, ARTIFICIAL SEQUENCE
  Synthetic Construct
GKSLRK

SEQ ID NO: 14716 - protein, 6 aa, ARTIFICIAL SEQUENCE
  Synthetic Construct
GKSLSK

SEQ ID NO: 14717 - protein, 6 aa, ARTIFICIAL SEQUENCE
  Synthetic Construct
GKSLTK

SEQ ID NO: 14718 - protein, 6 aa, ARTIFICIAL SEQUENCE
  Synthetic Construct
GKSLYK

SEQ ID NO: 14719 - protein, 6 aa, ARTIFICIAL SEQUENCE
  Synthetic Construct
GKSNAK

SEQ ID NO: 14720 - protein, 6 aa, ARTIFICIAL SEQUENCE
  Synthetic Construct
GKSNDK

SEQ ID NO: 14721 - protein, 6 aa, ARTIFICIAL SEQUENCE
  Synthetic Construct
GKSNEK

SEQ ID NO: 14722 - protein, 6 aa, ARTIFICIAL SEQUENCE
  Synthetic Construct
GKSNFK

SEQ ID NO: 14723 - protein, 6 aa, ARTIFICIAL SEQUENCE
  Synthetic Construct
GKSNGK

SEQ ID NO: 14724 - protein, 6 aa, ARTIFICIAL SEQUENCE
  Synthetic Construct
GKSNHK

SEQ ID NO: 14725 - protein, 6 aa, ARTIFICIAL SEQUENCE
  Synthetic Construct
GKSNIK

SEQ ID NO: 14726 - protein, 6 aa, ARTIFICIAL SEQUENCE
  Synthetic Construct
GKSNLK

SEQ ID NO: 14727 - protein, 6 aa, ARTIFICIAL SEQUENCE
  Synthetic Construct
GKSNNK

SEQ ID NO: 14728 - protein, 6 aa, ARTIFICIAL SEQUENCE
  Synthetic Construct
GKSNQK

SEQ ID NO: 14729 - protein, 6 aa, ARTIFICIAL SEQUENCE
  Synthetic Construct
GKSNRK

SEQ ID NO: 14730 - protein, 6 aa, ARTIFICIAL SEQUENCE
  Synthetic Construct
GKSNSK

SEQ ID NO: 14731 - protein, 6 aa, ARTIFICIAL SEQUENCE
  Synthetic Construct
GKSNTK

SEQ ID NO: 14732 - protein, 6 aa, ARTIFICIAL SEQUENCE
  Synthetic Construct
GKSNYK

SEQ ID NO: 14733 - protein, 6 aa, ARTIFICIAL SEQUENCE
  Synthetic Construct
GKSQAK

SEQ ID NO: 14734 - protein, 6 aa, ARTIFICIAL SEQUENCE
  Synthetic Construct
GKSQDK

SEQ ID NO: 14735 - protein, 6 aa, ARTIFICIAL SEQUENCE
  Synthetic Construct
GKSQEK

SEQ ID NO: 14736 - protein, 6 aa, ARTIFICIAL SEQUENCE
  Synthetic Construct
GKSQFK

SEQ ID NO: 14737 - protein, 6 aa, ARTIFICIAL SEQUENCE
  Synthetic Construct
GKSQGK

SEQ ID NO: 14738 - protein, 6 aa, ARTIFICIAL SEQUENCE
  Synthetic Construct
GKSQHK

SEQ ID NO: 14739 - protein, 6 aa, ARTIFICIAL SEQUENCE
  Synthetic Construct
GKSQIK

SEQ ID NO: 14740 - protein, 6 aa, ARTIFICIAL SEQUENCE
  Synthetic Construct
GKSQLK

SEQ ID NO: 14741 - protein, 6 aa, ARTIFICIAL SEQUENCE
  Synthetic Construct
GKSQNK

SEQ ID NO: 14742 - protein, 6 aa, ARTIFICIAL SEQUENCE
  Synthetic Construct
GKSQQK

SEQ ID NO: 14743 - protein, 6 aa, ARTIFICIAL SEQUENCE
  Synthetic Construct
GKSQRK

SEQ ID NO: 14744 - protein, 6 aa, ARTIFICIAL SEQUENCE
  Synthetic Construct
GKSQSK

SEQ ID NO: 14745 - protein, 6 aa, ARTIFICIAL SEQUENCE
  Synthetic Construct
GKSQTK

SEQ ID NO: 14746 - protein, 6 aa, ARTIFICIAL SEQUENCE
  Synthetic Construct
GKSQYK

SEQ ID NO: 14747 - protein, 6 aa, ARTIFICIAL SEQUENCE
  Synthetic Construct
GKSRAK

SEQ ID NO: 14748 - protein, 6 aa, ARTIFICIAL SEQUENCE
  Synthetic Construct
GKSRDK

SEQ ID NO: 14749 - protein, 6 aa, ARTIFICIAL SEQUENCE
  Synthetic Construct
GKSREK

SEQ ID NO: 14750 - protein, 6 aa, ARTIFICIAL SEQUENCE
  Synthetic Construct
GKSRFK

SEQ ID NO: 14751 - protein, 6 aa, ARTIFICIAL SEQUENCE
  Synthetic Construct
GKSRGK

SEQ ID NO: 14752 - protein, 6 aa, ARTIFICIAL SEQUENCE
  Synthetic Construct
GKSRHK

SEQ ID NO: 14753 - protein, 6 aa, ARTIFICIAL SEQUENCE
  Synthetic Construct
GKSRIK

SEQ ID NO: 14754 - protein, 6 aa, ARTIFICIAL SEQUENCE
  Synthetic Construct
GKSRLK

SEQ ID NO: 14755 - protein, 6 aa, ARTIFICIAL SEQUENCE
  Synthetic Construct
GKSRNK

SEQ ID NO: 14756 - protein, 6 aa, ARTIFICIAL SEQUENCE
  Synthetic Construct
GKSRQK

SEQ ID NO: 14757 - protein, 6 aa, ARTIFICIAL SEQUENCE
  Synthetic Construct
GKSRRK

SEQ ID NO: 14758 - protein, 6 aa, ARTIFICIAL SEQUENCE
  Synthetic Construct
GKSRSK

SEQ ID NO: 14759 - protein, 6 aa, ARTIFICIAL SEQUENCE
  Synthetic Construct
GKSRTK

SEQ ID NO: 14760 - protein, 6 aa, ARTIFICIAL SEQUENCE
  Synthetic Construct
GKSRYK

SEQ ID NO: 14761 - protein, 6 aa, ARTIFICIAL SEQUENCE
  Synthetic Construct
GKSSAK

SEQ ID NO: 14762 - protein, 6 aa, ARTIFICIAL SEQUENCE
  Synthetic Construct
GKSSDK

SEQ ID NO: 14763 - protein, 6 aa, ARTIFICIAL SEQUENCE
  Synthetic Construct
GKSSEK

SEQ ID NO: 14764 - protein, 6 aa, ARTIFICIAL SEQUENCE
  Synthetic Construct
GKSSFK

SEQ ID NO: 14765 - protein, 6 aa, ARTIFICIAL SEQUENCE
  Synthetic Construct
GKSSGK

SEQ ID NO: 14766 - protein, 6 aa, ARTIFICIAL SEQUENCE
  Synthetic Construct
GKSSHK

SEQ ID NO: 14767 - protein, 6 aa, ARTIFICIAL SEQUENCE
  Synthetic Construct
GKSSIK

SEQ ID NO: 14768 - protein, 6 aa, ARTIFICIAL SEQUENCE
  Synthetic Construct
GKSSLK

SEQ ID NO: 14769 - protein, 6 aa, ARTIFICIAL SEQUENCE
  Synthetic Construct
GKSSNK

SEQ ID NO: 14770 - protein, 6 aa, ARTIFICIAL SEQUENCE
  Synthetic Construct
GKSSQK

SEQ ID NO: 14771 - protein, 6 aa, ARTIFICIAL SEQUENCE
  Synthetic Construct
GKSSRK

SEQ ID NO: 14772 - protein, 6 aa, ARTIFICIAL SEQUENCE
  Synthetic Construct
GKSSSK

SEQ ID NO: 14773 - protein, 6 aa, ARTIFICIAL SEQUENCE
  Synthetic Construct
GKSSTK

SEQ ID NO: 14774 - protein, 6 aa, ARTIFICIAL SEQUENCE
  Synthetic Construct
GKSSYK

SEQ ID NO: 14775 - protein, 6 aa, ARTIFICIAL SEQUENCE
  Synthetic Construct
GKSTAK

SEQ ID NO: 14776 - protein, 6 aa, ARTIFICIAL SEQUENCE
  Synthetic Construct
GKSTDK

SEQ ID NO: 14777 - protein, 6 aa, ARTIFICIAL SEQUENCE
  Synthetic Construct
GKSTEK

SEQ ID NO: 14778 - protein, 6 aa, ARTIFICIAL SEQUENCE
  Synthetic Construct
GKSTFK

SEQ ID NO: 14779 - protein, 6 aa, ARTIFICIAL SEQUENCE
  Synthetic Construct
GKSTGK

SEQ ID NO: 14780 - protein, 6 aa, ARTIFICIAL SEQUENCE
  Synthetic Construct
GKSTHK

SEQ ID NO: 14781 - protein, 6 aa, ARTIFICIAL SEQUENCE
  Synthetic Construct
GKSTIK

SEQ ID NO: 14782 - protein, 6 aa, ARTIFICIAL SEQUENCE
  Synthetic Construct
GKSTLK

SEQ ID NO: 14783 - protein, 6 aa, ARTIFICIAL SEQUENCE
  Synthetic Construct
GKSTNK

SEQ ID NO: 14784 - protein, 6 aa, ARTIFICIAL SEQUENCE
  Synthetic Construct
GKSTQK

SEQ ID NO: 14785 - protein, 6 aa, ARTIFICIAL SEQUENCE
  Synthetic Construct
GKSTRK

SEQ ID NO: 14786 - protein, 6 aa, ARTIFICIAL SEQUENCE
  Synthetic Construct
GKSTSK

SEQ ID NO: 14787 - protein, 6 aa, ARTIFICIAL SEQUENCE
  Synthetic Construct
GKSTTK

SEQ ID NO: 14788 - protein, 6 aa, ARTIFICIAL SEQUENCE
  Synthetic Construct
GKSTYK

SEQ ID NO: 14789 - protein, 6 aa, ARTIFICIAL SEQUENCE
  Synthetic Construct
GKSYAK

SEQ ID NO: 14790 - protein, 6 aa, ARTIFICIAL SEQUENCE
  Synthetic Construct
GKSYDK

SEQ ID NO: 14791 - protein, 6 aa, ARTIFICIAL SEQUENCE
  Synthetic Construct
GKSYEK

SEQ ID NO: 14792 - protein, 6 aa, ARTIFICIAL SEQUENCE
  Synthetic Construct
GKSYFK

SEQ ID NO: 14793 - protein, 6 aa, ARTIFICIAL SEQUENCE
  Synthetic Construct
GKSYGK

SEQ ID NO: 14794 - protein, 6 aa, ARTIFICIAL SEQUENCE
  Synthetic Construct
GKSYHK

SEQ ID NO: 14795 - protein, 6 aa, ARTIFICIAL SEQUENCE
  Synthetic Construct
GKSYIK

SEQ ID NO: 14796 - protein, 6 aa, ARTIFICIAL SEQUENCE
  Synthetic Construct
GKSYLK

SEQ ID NO: 14797 - protein, 6 aa, ARTIFICIAL SEQUENCE
  Synthetic Construct
GKSYNK

SEQ ID NO: 14798 - protein, 6 aa, ARTIFICIAL SEQUENCE
  Synthetic Construct
GKSYQK

SEQ ID NO: 14799 - protein, 6 aa, ARTIFICIAL SEQUENCE
  Synthetic Construct
GKSYRK

SEQ ID NO: 14800 - protein, 6 aa, ARTIFICIAL SEQUENCE
  Synthetic Construct
GKSYSK

SEQ ID NO: 14801 - protein, 6 aa, ARTIFICIAL SEQUENCE
  Synthetic Construct
GKSYTK

SEQ ID NO: 14802 - protein, 6 aa, ARTIFICIAL SEQUENCE
  Synthetic Construct
GKSYYK

SEQ ID NO: 14803 - protein, 6 aa, ARTIFICIAL SEQUENCE
  Synthetic Construct
GKTAAK

SEQ ID NO: 14804 - protein, 6 aa, ARTIFICIAL SEQUENCE
  Synthetic Construct
GKTADK

SEQ ID NO: 14805 - protein, 6 aa, ARTIFICIAL SEQUENCE
  Synthetic Construct
GKTAEK

SEQ ID NO: 14806 - protein, 6 aa, ARTIFICIAL SEQUENCE
  Synthetic Construct
GKTAFK

SEQ ID NO: 14807 - protein, 6 aa, ARTIFICIAL SEQUENCE
  Synthetic Construct
GKTAGK

SEQ ID NO: 14808 - protein, 6 aa, ARTIFICIAL SEQUENCE
  Synthetic Construct
GKTAHK

SEQ ID NO: 14809 - protein, 6 aa, ARTIFICIAL SEQUENCE
  Synthetic Construct
GKTAIK

SEQ ID NO: 14810 - protein, 6 aa, ARTIFICIAL SEQUENCE
  Synthetic Construct
GKTALK

SEQ ID NO: 14811 - protein, 6 aa, ARTIFICIAL SEQUENCE
  Synthetic Construct
GKTANK

SEQ ID NO: 14812 - protein, 6 aa, ARTIFICIAL SEQUENCE
  Synthetic Construct
GKTAQK

SEQ ID NO: 14813 - protein, 6 aa, ARTIFICIAL SEQUENCE
  Synthetic Construct
GKTARK

SEQ ID NO: 14814 - protein, 6 aa, ARTIFICIAL SEQUENCE
  Synthetic Construct
GKTASK

SEQ ID NO: 14815 - protein, 6 aa, ARTIFICIAL SEQUENCE
  Synthetic Construct
GKTATK

SEQ ID NO: 14816 - protein, 6 aa, ARTIFICIAL SEQUENCE
  Synthetic Construct
GKTAYK

SEQ ID NO: 14817 - protein, 6 aa, ARTIFICIAL SEQUENCE
  Synthetic Construct
GKTDAK

SEQ ID NO: 14818 - protein, 6 aa, ARTIFICIAL SEQUENCE
  Synthetic Construct
GKTDDK

SEQ ID NO: 14819 - protein, 6 aa, ARTIFICIAL SEQUENCE
  Synthetic Construct
GKTDEK

SEQ ID NO: 14820 - protein, 6 aa, ARTIFICIAL SEQUENCE
  Synthetic Construct
GKTDFK

SEQ ID NO: 14821 - protein, 6 aa, ARTIFICIAL SEQUENCE
  Synthetic Construct
GKTDGK

SEQ ID NO: 14822 - protein, 6 aa, ARTIFICIAL SEQUENCE
  Synthetic Construct
GKTDHK

SEQ ID NO: 14823 - protein, 6 aa, ARTIFICIAL SEQUENCE
  Synthetic Construct
GKTDIK

SEQ ID NO: 14824 - protein, 6 aa, ARTIFICIAL SEQUENCE
  Synthetic Construct
GKTDLK

SEQ ID NO: 14825 - protein, 6 aa, ARTIFICIAL SEQUENCE
  Synthetic Construct
GKTDNK

SEQ ID NO: 14826 - protein, 6 aa, ARTIFICIAL SEQUENCE
  Synthetic Construct
GKTDQK

SEQ ID NO: 14827 - protein, 6 aa, ARTIFICIAL SEQUENCE
  Synthetic Construct
GKTDRK

SEQ ID NO: 14828 - protein, 6 aa, ARTIFICIAL SEQUENCE
  Synthetic Construct
GKTDSK

SEQ ID NO: 14829 - protein, 6 aa, ARTIFICIAL SEQUENCE
  Synthetic Construct
GKTDTK

SEQ ID NO: 14830 - protein, 6 aa, ARTIFICIAL SEQUENCE
  Synthetic Construct
GKTDYK

SEQ ID NO: 14831 - protein, 6 aa, ARTIFICIAL SEQUENCE
  Synthetic Construct
GKTEAK

SEQ ID NO: 14832 - protein, 6 aa, ARTIFICIAL SEQUENCE
  Synthetic Construct
GKTEDK

SEQ ID NO: 14833 - protein, 6 aa, ARTIFICIAL SEQUENCE
  Synthetic Construct
GKTEEK

SEQ ID NO: 14834 - protein, 6 aa, ARTIFICIAL SEQUENCE
  Synthetic Construct
GKTEFK

SEQ ID NO: 14835 - protein, 6 aa, ARTIFICIAL SEQUENCE
  Synthetic Construct
GKTEGK

SEQ ID NO: 14836 - protein, 6 aa, ARTIFICIAL SEQUENCE
  Synthetic Construct
GKTEHK

SEQ ID NO: 14837 - protein, 6 aa, ARTIFICIAL SEQUENCE
  Synthetic Construct
GKTEIK

SEQ ID NO: 14838 - protein, 6 aa, ARTIFICIAL SEQUENCE
  Synthetic Construct
GKTELK

SEQ ID NO: 14839 - protein, 6 aa, ARTIFICIAL SEQUENCE
  Synthetic Construct
GKTENK

SEQ ID NO: 14840 - protein, 6 aa, ARTIFICIAL SEQUENCE
  Synthetic Construct
GKTEQK

SEQ ID NO: 14841 - protein, 6 aa, ARTIFICIAL SEQUENCE
  Synthetic Construct
GKTERK

SEQ ID NO: 14842 - protein, 6 aa, ARTIFICIAL SEQUENCE
  Synthetic Construct
GKTESK

SEQ ID NO: 14843 - protein, 6 aa, ARTIFICIAL SEQUENCE
  Synthetic Construct
GKTETK

SEQ ID NO: 14844 - protein, 6 aa, ARTIFICIAL SEQUENCE
  Synthetic Construct
GKTEYK

SEQ ID NO: 14845 - protein, 6 aa, ARTIFICIAL SEQUENCE
  Synthetic Construct
GKTFAK

SEQ ID NO: 14846 - protein, 6 aa, ARTIFICIAL SEQUENCE
  Synthetic Construct
GKTFDK

SEQ ID NO: 14847 - protein, 6 aa, ARTIFICIAL SEQUENCE
  Synthetic Construct
GKTFEK

SEQ ID NO: 14848 - protein, 6 aa, ARTIFICIAL SEQUENCE
  Synthetic Construct
GKTFFK

SEQ ID NO: 14849 - protein, 6 aa, ARTIFICIAL SEQUENCE
  Synthetic Construct
GKTFGK

SEQ ID NO: 14850 - protein, 6 aa, ARTIFICIAL SEQUENCE
  Synthetic Construct
GKTFHK

SEQ ID NO: 14851 - protein, 6 aa, ARTIFICIAL SEQUENCE
  Synthetic Construct
GKTFIK

SEQ ID NO: 14852 - protein, 6 aa, ARTIFICIAL SEQUENCE
  Synthetic Construct
GKTFLK

SEQ ID NO: 14853 - protein, 6 aa, ARTIFICIAL SEQUENCE
  Synthetic Construct
GKTFNK

SEQ ID NO: 14854 - protein, 6 aa, ARTIFICIAL SEQUENCE
  Synthetic Construct
GKTFQK

SEQ ID NO: 14855 - protein, 6 aa, ARTIFICIAL SEQUENCE
  Synthetic Construct
GKTFRK

SEQ ID NO: 14856 - protein, 6 aa, ARTIFICIAL SEQUENCE
  Synthetic Construct
GKTFSK

SEQ ID NO: 14857 - protein, 6 aa, ARTIFICIAL SEQUENCE
  Synthetic Construct
GKTFTK

SEQ ID NO: 14858 - protein, 6 aa, ARTIFICIAL SEQUENCE
  Synthetic Construct
GKTFYK

SEQ ID NO: 14859 - protein, 6 aa, ARTIFICIAL SEQUENCE
  Synthetic Construct
GKTGAK

SEQ ID NO: 14860 - protein, 6 aa, ARTIFICIAL SEQUENCE
  Synthetic Construct
GKTGDK

SEQ ID NO: 14861 - protein, 6 aa, ARTIFICIAL SEQUENCE
  Synthetic Construct
GKTGEK

SEQ ID NO: 14862 - protein, 6 aa, ARTIFICIAL SEQUENCE
  Synthetic Construct
GKTGFK

SEQ ID NO: 14863 - protein, 6 aa, ARTIFICIAL SEQUENCE
  Synthetic Construct
GKTGGK

SEQ ID NO: 14864 - protein, 6 aa, ARTIFICIAL SEQUENCE
  Synthetic Construct
GKTGHK

SEQ ID NO: 14865 - protein, 6 aa, ARTIFICIAL SEQUENCE
  Synthetic Construct
GKTGIK

SEQ ID NO: 14866 - protein, 6 aa, ARTIFICIAL SEQUENCE
  Synthetic Construct
GKTGLK

SEQ ID NO: 14867 - protein, 6 aa, ARTIFICIAL SEQUENCE
  Synthetic Construct
GKTGNK

SEQ ID NO: 14868 - protein, 6 aa, ARTIFICIAL SEQUENCE
  Synthetic Construct
GKTGQK

SEQ ID NO: 14869 - protein, 6 aa, ARTIFICIAL SEQUENCE
  Synthetic Construct
GKTGRK

SEQ ID NO: 14870 - protein, 6 aa, ARTIFICIAL SEQUENCE
  Synthetic Construct
GKTGSK

SEQ ID NO: 14871 - protein, 6 aa, ARTIFICIAL SEQUENCE
  Synthetic Construct
GKTGTK

SEQ ID NO: 14872 - protein, 6 aa, ARTIFICIAL SEQUENCE
  Synthetic Construct
GKTGYK

SEQ ID NO: 14873 - protein, 6 aa, ARTIFICIAL SEQUENCE
  Synthetic Construct
GKTHAK

SEQ ID NO: 14874 - protein, 6 aa, ARTIFICIAL SEQUENCE
  Synthetic Construct
GKTHDK

SEQ ID NO: 14875 - protein, 6 aa, ARTIFICIAL SEQUENCE
  Synthetic Construct
GKTHEK

SEQ ID NO: 14876 - protein, 6 aa, ARTIFICIAL SEQUENCE
  Synthetic Construct
GKTHFK

SEQ ID NO: 14877 - protein, 6 aa, ARTIFICIAL SEQUENCE
  Synthetic Construct
GKTHGK

SEQ ID NO: 14878 - protein, 6 aa, ARTIFICIAL SEQUENCE
  Synthetic Construct
GKTHHK

SEQ ID NO: 14879 - protein, 6 aa, ARTIFICIAL SEQUENCE
  Synthetic Construct
GKTHIK

SEQ ID NO: 14880 - protein, 6 aa, ARTIFICIAL SEQUENCE
  Synthetic Construct
GKTHLK

SEQ ID NO: 14881 - protein, 6 aa, ARTIFICIAL SEQUENCE
  Synthetic Construct
GKTHNK

SEQ ID NO: 14882 - protein, 6 aa, ARTIFICIAL SEQUENCE
  Synthetic Construct
GKTHQK

SEQ ID NO: 14883 - protein, 6 aa, ARTIFICIAL SEQUENCE
  Synthetic Construct
GKTHRK

SEQ ID NO: 14884 - protein, 6 aa, ARTIFICIAL SEQUENCE
  Synthetic Construct
GKTHSK

SEQ ID NO: 14885 - protein, 6 aa, ARTIFICIAL SEQUENCE
  Synthetic Construct
GKTHTK

SEQ ID NO: 14886 - protein, 6 aa, ARTIFICIAL SEQUENCE
  Synthetic Construct
GKTHYK

SEQ ID NO: 14887 - protein, 6 aa, ARTIFICIAL SEQUENCE
  Synthetic Construct
GKTIAK

SEQ ID NO: 14888 - protein, 6 aa, ARTIFICIAL SEQUENCE
  Synthetic Construct
GKTIDK

SEQ ID NO: 14889 - protein, 6 aa, ARTIFICIAL SEQUENCE
  Synthetic Construct
GKTIEK

SEQ ID NO: 14890 - protein, 6 aa, ARTIFICIAL SEQUENCE
  Synthetic Construct
GKTIFK

SEQ ID NO: 14891 - protein, 6 aa, ARTIFICIAL SEQUENCE
  Synthetic Construct
GKTIGK

SEQ ID NO: 14892 - protein, 6 aa, ARTIFICIAL SEQUENCE
  Synthetic Construct
GKTIHK

SEQ ID NO: 14893 - protein, 6 aa, ARTIFICIAL SEQUENCE
  Synthetic Construct
GKTIIK

SEQ ID NO: 14894 - protein, 6 aa, ARTIFICIAL SEQUENCE
  Synthetic Construct
GKTILK

SEQ ID NO: 14895 - protein, 6 aa, ARTIFICIAL SEQUENCE
  Synthetic Construct
GKTINK

SEQ ID NO: 14896 - protein, 6 aa, ARTIFICIAL SEQUENCE
  Synthetic Construct
GKTIQK

SEQ ID NO: 14897 - protein, 6 aa, ARTIFICIAL SEQUENCE
  Synthetic Construct
GKTIRK

SEQ ID NO: 14898 - protein, 6 aa, ARTIFICIAL SEQUENCE
  Synthetic Construct
GKTISK

SEQ ID NO: 14899 - protein, 6 aa, ARTIFICIAL SEQUENCE
  Synthetic Construct
GKTITK

SEQ ID NO: 14900 - protein, 6 aa, ARTIFICIAL SEQUENCE
  Synthetic Construct
GKTIYK

SEQ ID NO: 14901 - protein, 6 aa, ARTIFICIAL SEQUENCE
  Synthetic Construct
GKTLAK

SEQ ID NO: 14902 - protein, 6 aa, ARTIFICIAL SEQUENCE
  Synthetic Construct
GKTLDK

SEQ ID NO: 14903 - protein, 6 aa, ARTIFICIAL SEQUENCE
  Synthetic Construct
GKTLEK

SEQ ID NO: 14904 - protein, 6 aa, ARTIFICIAL SEQUENCE
  Synthetic Construct
GKTLFK

SEQ ID NO: 14905 - protein, 6 aa, ARTIFICIAL SEQUENCE
  Synthetic Construct
GKTLGK

SEQ ID NO: 14906 - protein, 6 aa, ARTIFICIAL SEQUENCE
  Synthetic Construct
GKTLHK

SEQ ID NO: 14907 - protein, 6 aa, ARTIFICIAL SEQUENCE
  Synthetic Construct
GKTLIK

SEQ ID NO: 14908 - protein, 6 aa, ARTIFICIAL SEQUENCE
  Synthetic Construct
GKTLLK

SEQ ID NO: 14909 - protein, 6 aa, ARTIFICIAL SEQUENCE
  Synthetic Construct
GKTLNK

SEQ ID NO: 14910 - protein, 6 aa, ARTIFICIAL SEQUENCE
  Synthetic Construct
GKTLQK

SEQ ID NO: 14911 - protein, 6 aa, ARTIFICIAL SEQUENCE
  Synthetic Construct
GKTLRK

SEQ ID NO: 14912 - protein, 6 aa, ARTIFICIAL SEQUENCE
  Synthetic Construct
GKTLSK

SEQ ID NO: 14913 - protein, 6 aa, ARTIFICIAL SEQUENCE
  Synthetic Construct
GKTLTK

SEQ ID NO: 14914 - protein, 6 aa, ARTIFICIAL SEQUENCE
  Synthetic Construct
GKTLYK

SEQ ID NO: 14915 - protein, 6 aa, ARTIFICIAL SEQUENCE
  Synthetic Construct
GKTNAK

SEQ ID NO: 14916 - protein, 6 aa, ARTIFICIAL SEQUENCE
  Synthetic Construct
GKTNDK

SEQ ID NO: 14917 - protein, 6 aa, ARTIFICIAL SEQUENCE
  Synthetic Construct
GKTNEK

SEQ ID NO: 14918 - protein, 6 aa, ARTIFICIAL SEQUENCE
  Synthetic Construct
GKTNFK

SEQ ID NO: 14919 - protein, 6 aa, ARTIFICIAL SEQUENCE
  Synthetic Construct
GKTNGK

SEQ ID NO: 14920 - protein, 6 aa, ARTIFICIAL SEQUENCE
  Synthetic Construct
GKTNHK

SEQ ID NO: 14921 - protein, 6 aa, ARTIFICIAL SEQUENCE
  Synthetic Construct
GKTNIK

SEQ ID NO: 14922 - protein, 6 aa, ARTIFICIAL SEQUENCE
  Synthetic Construct
GKTNLK

SEQ ID NO: 14923 - protein, 6 aa, ARTIFICIAL SEQUENCE
  Synthetic Construct
GKTNNK

SEQ ID NO: 14924 - protein, 6 aa, ARTIFICIAL SEQUENCE
  Synthetic Construct
GKTNQK

SEQ ID NO: 14925 - protein, 6 aa, ARTIFICIAL SEQUENCE
  Synthetic Construct
GKTNRK

SEQ ID NO: 14926 - protein, 6 aa, ARTIFICIAL SEQUENCE
  Synthetic Construct
GKTNSK

SEQ ID NO: 14927 - protein, 6 aa, ARTIFICIAL SEQUENCE
  Synthetic Construct
GKTNTK

SEQ ID NO: 14928 - protein, 6 aa, ARTIFICIAL SEQUENCE
  Synthetic Construct
GKTNYK

SEQ ID NO: 14929 - protein, 6 aa, ARTIFICIAL SEQUENCE
  Synthetic Construct
GKTQAK

SEQ ID NO: 14930 - protein, 6 aa, ARTIFICIAL SEQUENCE
  Synthetic Construct
GKTQDK

SEQ ID NO: 14931 - protein, 6 aa, ARTIFICIAL SEQUENCE
  Synthetic Construct
GKTQEK

SEQ ID NO: 14932 - protein, 6 aa, ARTIFICIAL SEQUENCE
  Synthetic Construct
GKTQFK

SEQ ID NO: 14933 - protein, 6 aa, ARTIFICIAL SEQUENCE
  Synthetic Construct
GKTQGK

SEQ ID NO: 14934 - protein, 6 aa, ARTIFICIAL SEQUENCE
  Synthetic Construct
GKTQHK

SEQ ID NO: 14935 - protein, 6 aa, ARTIFICIAL SEQUENCE
  Synthetic Construct
GKTQIK

SEQ ID NO: 14936 - protein, 6 aa, ARTIFICIAL SEQUENCE
  Synthetic Construct
GKTQLK

SEQ ID NO: 14937 - protein, 6 aa, ARTIFICIAL SEQUENCE
  Synthetic Construct
GKTQNK

SEQ ID NO: 14938 - protein, 6 aa, ARTIFICIAL SEQUENCE
  Synthetic Construct
GKTQQK

SEQ ID NO: 14939 - protein, 6 aa, ARTIFICIAL SEQUENCE
  Synthetic Construct
GKTQRK

SEQ ID NO: 14940 - protein, 6 aa, ARTIFICIAL SEQUENCE
  Synthetic Construct
GKTQSK

SEQ ID NO: 14941 - protein, 6 aa, ARTIFICIAL SEQUENCE
  Synthetic Construct
GKTQTK

SEQ ID NO: 14942 - protein, 6 aa, ARTIFICIAL SEQUENCE
  Synthetic Construct
GKTQYK

SEQ ID NO: 14943 - protein, 6 aa, ARTIFICIAL SEQUENCE
  Synthetic Construct
GKTRAK

SEQ ID NO: 14944 - protein, 6 aa, ARTIFICIAL SEQUENCE
  Synthetic Construct
GKTRDK

SEQ ID NO: 14945 - protein, 6 aa, ARTIFICIAL SEQUENCE
  Synthetic Construct
GKTREK

SEQ ID NO: 14946 - protein, 6 aa, ARTIFICIAL SEQUENCE
  Synthetic Construct
GKTRFK

SEQ ID NO: 14947 - protein, 6 aa, ARTIFICIAL SEQUENCE
  Synthetic Construct
GKTRGK

SEQ ID NO: 14948 - protein, 6 aa, ARTIFICIAL SEQUENCE
  Synthetic Construct
GKTRHK

SEQ ID NO: 14949 - protein, 6 aa, ARTIFICIAL SEQUENCE
  Synthetic Construct
GKTRIK

SEQ ID NO: 14950 - protein, 6 aa, ARTIFICIAL SEQUENCE
  Synthetic Construct
GKTRLK

SEQ ID NO: 14951 - protein, 6 aa, ARTIFICIAL SEQUENCE
  Synthetic Construct
GKTRNK

SEQ ID NO: 14952 - protein, 6 aa, ARTIFICIAL SEQUENCE
  Synthetic Construct
GKTRQK

SEQ ID NO: 14953 - protein, 6 aa, ARTIFICIAL SEQUENCE
  Synthetic Construct
GKTRRK

SEQ ID NO: 14954 - protein, 6 aa, ARTIFICIAL SEQUENCE
  Synthetic Construct
GKTRSK

SEQ ID NO: 14955 - protein, 6 aa, ARTIFICIAL SEQUENCE
  Synthetic Construct
GKTRTK

SEQ ID NO: 14956 - protein, 6 aa, ARTIFICIAL SEQUENCE
  Synthetic Construct
GKTRYK

SEQ ID NO: 14957 - protein, 6 aa, ARTIFICIAL SEQUENCE
  Synthetic Construct
GKTSAK

SEQ ID NO: 14958 - protein, 6 aa, ARTIFICIAL SEQUENCE
  Synthetic Construct
GKTSDK

SEQ ID NO: 14959 - protein, 6 aa, ARTIFICIAL SEQUENCE
  Synthetic Construct
GKTSEK

SEQ ID NO: 14960 - protein, 6 aa, ARTIFICIAL SEQUENCE
  Synthetic Construct
GKTSFK

SEQ ID NO: 14961 - protein, 6 aa, ARTIFICIAL SEQUENCE
  Synthetic Construct
GKTSGK

SEQ ID NO: 14962 - protein, 6 aa, ARTIFICIAL SEQUENCE
  Synthetic Construct
GKTSHK

SEQ ID NO: 14963 - protein, 6 aa, ARTIFICIAL SEQUENCE
  Synthetic Construct
GKTSIK

SEQ ID NO: 14964 - protein, 6 aa, ARTIFICIAL SEQUENCE
  Synthetic Construct
GKTSLK

SEQ ID NO: 14965 - protein, 6 aa, ARTIFICIAL SEQUENCE
  Synthetic Construct
GKTSNK

SEQ ID NO: 14966 - protein, 6 aa, ARTIFICIAL SEQUENCE
  Synthetic Construct
GKTSQK

SEQ ID NO: 14967 - protein, 6 aa, ARTIFICIAL SEQUENCE
  Synthetic Construct
GKTSRK

SEQ ID NO: 14968 - protein, 6 aa, ARTIFICIAL SEQUENCE
  Synthetic Construct
GKTSSK

SEQ ID NO: 14969 - protein, 6 aa, ARTIFICIAL SEQUENCE
  Synthetic Construct
GKTSTK

SEQ ID NO: 14970 - protein, 6 aa, ARTIFICIAL SEQUENCE
  Synthetic Construct
GKTSYK

SEQ ID NO: 14971 - protein, 6 aa, ARTIFICIAL SEQUENCE
  Synthetic Construct
GKTTAK

SEQ ID NO: 14972 - protein, 6 aa, ARTIFICIAL SEQUENCE
  Synthetic Construct
GKTTDK

SEQ ID NO: 14973 - protein, 6 aa, ARTIFICIAL SEQUENCE
  Synthetic Construct
GKTTEK

SEQ ID NO: 14974 - protein, 6 aa, ARTIFICIAL SEQUENCE
  Synthetic Construct
GKTTFK

SEQ ID NO: 14975 - protein, 6 aa, ARTIFICIAL SEQUENCE
  Synthetic Construct
GKTTGK

SEQ ID NO: 14976 - protein, 6 aa, ARTIFICIAL SEQUENCE
  Synthetic Construct
GKTTHK

SEQ ID NO: 14977 - protein, 6 aa, ARTIFICIAL SEQUENCE
  Synthetic Construct
GKTTIK

SEQ ID NO: 14978 - protein, 6 aa, ARTIFICIAL SEQUENCE
  Synthetic Construct
GKTTLK

SEQ ID NO: 14979 - protein, 6 aa, ARTIFICIAL SEQUENCE
  Synthetic Construct
GKTTNK

SEQ ID NO: 14980 - protein, 6 aa, ARTIFICIAL SEQUENCE
  Synthetic Construct
GKTTQK

SEQ ID NO: 14981 - protein, 6 aa, ARTIFICIAL SEQUENCE
  Synthetic Construct
GKTTRK

SEQ ID NO: 14982 - protein, 6 aa, ARTIFICIAL SEQUENCE
  Synthetic Construct
GKTTSK

SEQ ID NO: 14983 - protein, 6 aa, ARTIFICIAL SEQUENCE
  Synthetic Construct
GKTTTK

SEQ ID NO: 14984 - protein, 6 aa, ARTIFICIAL SEQUENCE
  Synthetic Construct
GKTTYK

SEQ ID NO: 14985 - protein, 6 aa, ARTIFICIAL SEQUENCE
  Synthetic Construct
GKTYAK

SEQ ID NO: 14986 - protein, 6 aa, ARTIFICIAL SEQUENCE
  Synthetic Construct
GKTYDK

SEQ ID NO: 14987 - protein, 6 aa, ARTIFICIAL SEQUENCE
  Synthetic Construct
GKTYEK

SEQ ID NO: 14988 - protein, 6 aa, ARTIFICIAL SEQUENCE
  Synthetic Construct
GKTYFK

SEQ ID NO: 14989 - protein, 6 aa, ARTIFICIAL SEQUENCE
  Synthetic Construct
GKTYGK

SEQ ID NO: 14990 - protein, 6 aa, ARTIFICIAL SEQUENCE
  Synthetic Construct
GKTYHK

SEQ ID NO: 14991 - protein, 6 aa, ARTIFICIAL SEQUENCE
  Synthetic Construct
GKTYIK

SEQ ID NO: 14992 - protein, 6 aa, ARTIFICIAL SEQUENCE
  Synthetic Construct
GKTYLK

SEQ ID NO: 14993 - protein, 6 aa, ARTIFICIAL SEQUENCE
  Synthetic Construct
GKTYNK

SEQ ID NO: 14994 - protein, 6 aa, ARTIFICIAL SEQUENCE
  Synthetic Construct
GKTYQK

SEQ ID NO: 14995 - protein, 6 aa, ARTIFICIAL SEQUENCE
  Synthetic Construct
GKTYRK

SEQ ID NO: 14996 - protein, 6 aa, ARTIFICIAL SEQUENCE
  Synthetic Construct
GKTYSK

SEQ ID NO: 14997 - protein, 6 aa, ARTIFICIAL SEQUENCE
  Synthetic Construct
GKTYTK

SEQ ID NO: 14998 - protein, 6 aa, ARTIFICIAL SEQUENCE
  Synthetic Construct
GKTYYK

SEQ ID NO: 14999 - protein, 6 aa, ARTIFICIAL SEQUENCE
  Synthetic Construct
GKYAAK

SEQ ID NO: 15000 - protein, 6 aa, ARTIFICIAL SEQUENCE
  Synthetic Construct
GKYADK

SEQ ID NO: 15001 - protein, 6 aa, ARTIFICIAL SEQUENCE
  Synthetic Construct
GKYAEK

SEQ ID NO: 15002 - protein, 6 aa, ARTIFICIAL SEQUENCE
  Synthetic Construct
GKYAFK

SEQ ID NO: 15003 - protein, 6 aa, ARTIFICIAL SEQUENCE
  Synthetic Construct
GKYAGK

SEQ ID NO: 15004 - protein, 6 aa, ARTIFICIAL SEQUENCE
  Synthetic Construct
GKYAHK

SEQ ID NO: 15005 - protein, 6 aa, ARTIFICIAL SEQUENCE
  Synthetic Construct
GKYAIK

SEQ ID NO: 15006 - protein, 6 aa, ARTIFICIAL SEQUENCE
  Synthetic Construct
GKYALK

SEQ ID NO: 15007 - protein, 6 aa, ARTIFICIAL SEQUENCE
  Synthetic Construct
GKYANK

SEQ ID NO: 15008 - protein, 6 aa, ARTIFICIAL SEQUENCE
  Synthetic Construct
GKYAQK

SEQ ID NO: 15009 - protein, 6 aa, ARTIFICIAL SEQUENCE
  Synthetic Construct
GKYARK

SEQ ID NO: 15010 - protein, 6 aa, ARTIFICIAL SEQUENCE
  Synthetic Construct
GKYASK

SEQ ID NO: 15011 - protein, 6 aa, ARTIFICIAL SEQUENCE
  Synthetic Construct
GKYATK

SEQ ID NO: 15012 - protein, 6 aa, ARTIFICIAL SEQUENCE
  Synthetic Construct
GKYAYK

SEQ ID NO: 15013 - protein, 6 aa, ARTIFICIAL SEQUENCE
  Synthetic Construct
GKYDAK

SEQ ID NO: 15014 - protein, 6 aa, ARTIFICIAL SEQUENCE
  Synthetic Construct
GKYDDK

SEQ ID NO: 15015 - protein, 6 aa, ARTIFICIAL SEQUENCE
  Synthetic Construct
GKYDEK

SEQ ID NO: 15016 - protein, 6 aa, ARTIFICIAL SEQUENCE
  Synthetic Construct
GKYDFK

SEQ ID NO: 15017 - protein, 6 aa, ARTIFICIAL SEQUENCE
  Synthetic Construct
GKYDGK

SEQ ID NO: 15018 - protein, 6 aa, ARTIFICIAL SEQUENCE
  Synthetic Construct
GKYDHK

SEQ ID NO: 15019 - protein, 6 aa, ARTIFICIAL SEQUENCE
  Synthetic Construct
GKYDIK

SEQ ID NO: 15020 - protein, 6 aa, ARTIFICIAL SEQUENCE
  Synthetic Construct
GKYDLK

SEQ ID NO: 15021 - protein, 6 aa, ARTIFICIAL SEQUENCE
  Synthetic Construct
GKYDNK

SEQ ID NO: 15022 - protein, 6 aa, ARTIFICIAL SEQUENCE
  Synthetic Construct
GKYDQK

SEQ ID NO: 15023 - protein, 6 aa, ARTIFICIAL SEQUENCE
  Synthetic Construct
GKYDRK

SEQ ID NO: 15024 - protein, 6 aa, ARTIFICIAL SEQUENCE
  Synthetic Construct
GKYDSK

SEQ ID NO: 15025 - protein, 6 aa, ARTIFICIAL SEQUENCE
  Synthetic Construct
GKYDTK

SEQ ID NO: 15026 - protein, 6 aa, ARTIFICIAL SEQUENCE
  Synthetic Construct
GKYDYK

SEQ ID NO: 15027 - protein, 6 aa, ARTIFICIAL SEQUENCE
  Synthetic Construct
GKYEAK

SEQ ID NO: 15028 - protein, 6 aa, ARTIFICIAL SEQUENCE
  Synthetic Construct
GKYEDK

SEQ ID NO: 15029 - protein, 6 aa, ARTIFICIAL SEQUENCE
  Synthetic Construct
GKYEEK

SEQ ID NO: 15030 - protein, 6 aa, ARTIFICIAL SEQUENCE
  Synthetic Construct
GKYEFK

SEQ ID NO: 15031 - protein, 6 aa, ARTIFICIAL SEQUENCE
  Synthetic Construct
GKYEGK

SEQ ID NO: 15032 - protein, 6 aa, ARTIFICIAL SEQUENCE
  Synthetic Construct
GKYEHK

SEQ ID NO: 15033 - protein, 6 aa, ARTIFICIAL SEQUENCE
  Synthetic Construct
GKYEIK

SEQ ID NO: 15034 - protein, 6 aa, ARTIFICIAL SEQUENCE
  Synthetic Construct
GKYELK

SEQ ID NO: 15035 - protein, 6 aa, ARTIFICIAL SEQUENCE
  Synthetic Construct
GKYENK

SEQ ID NO: 15036 - protein, 6 aa, ARTIFICIAL SEQUENCE
  Synthetic Construct
GKYEQK

SEQ ID NO: 15037 - protein, 6 aa, ARTIFICIAL SEQUENCE
  Synthetic Construct
GKYERK

SEQ ID NO: 15038 - protein, 6 aa, ARTIFICIAL SEQUENCE
  Synthetic Construct
GKYESK

SEQ ID NO: 15039 - protein, 6 aa, ARTIFICIAL SEQUENCE
  Synthetic Construct
GKYETK

SEQ ID NO: 15040 - protein, 6 aa, ARTIFICIAL SEQUENCE
  Synthetic Construct
GKYEYK

SEQ ID NO: 15041 - protein, 6 aa, ARTIFICIAL SEQUENCE
  Synthetic Construct
GKYFAK

SEQ ID NO: 15042 - protein, 6 aa, ARTIFICIAL SEQUENCE
  Synthetic Construct
GKYFDK

SEQ ID NO: 15043 - protein, 6 aa, ARTIFICIAL SEQUENCE
  Synthetic Construct
GKYFEK

SEQ ID NO: 15044 - protein, 6 aa, ARTIFICIAL SEQUENCE
  Synthetic Construct
GKYFFK

SEQ ID NO: 15045 - protein, 6 aa, ARTIFICIAL SEQUENCE
  Synthetic Construct
GKYFGK

SEQ ID NO: 15046 - protein, 6 aa, ARTIFICIAL SEQUENCE
  Synthetic Construct
GKYFHK

SEQ ID NO: 15047 - protein, 6 aa, ARTIFICIAL SEQUENCE
  Synthetic Construct
GKYFIK

SEQ ID NO: 15048 - protein, 6 aa, ARTIFICIAL SEQUENCE
  Synthetic Construct
GKYFLK

SEQ ID NO: 15049 - protein, 6 aa, ARTIFICIAL SEQUENCE
  Synthetic Construct
GKYFNK

SEQ ID NO: 15050 - protein, 6 aa, ARTIFICIAL SEQUENCE
  Synthetic Construct
GKYFQK

SEQ ID NO: 15051 - protein, 6 aa, ARTIFICIAL SEQUENCE
  Synthetic Construct
GKYFRK

SEQ ID NO: 15052 - protein, 6 aa, ARTIFICIAL SEQUENCE
  Synthetic Construct
GKYFSK

SEQ ID NO: 15053 - protein, 6 aa, ARTIFICIAL SEQUENCE
  Synthetic Construct
GKYFTK

SEQ ID NO: 15054 - protein, 6 aa, ARTIFICIAL SEQUENCE
  Synthetic Construct
GKYFYK

SEQ ID NO: 15055 - protein, 6 aa, ARTIFICIAL SEQUENCE
  Synthetic Construct
GKYGAK

SEQ ID NO: 15056 - protein, 6 aa, ARTIFICIAL SEQUENCE
  Synthetic Construct
GKYGDK

SEQ ID NO: 15057 - protein, 6 aa, ARTIFICIAL SEQUENCE
  Synthetic Construct
GKYGEK

SEQ ID NO: 15058 - protein, 6 aa, ARTIFICIAL SEQUENCE
  Synthetic Construct
GKYGFK

SEQ ID NO: 15059 - protein, 6 aa, ARTIFICIAL SEQUENCE
  Synthetic Construct
GKYGGK

SEQ ID NO: 15060 - protein, 6 aa, ARTIFICIAL SEQUENCE
  Synthetic Construct
GKYGHK

SEQ ID NO: 15061 - protein, 6 aa, ARTIFICIAL SEQUENCE
  Synthetic Construct
GKYGIK

SEQ ID NO: 15062 - protein, 6 aa, ARTIFICIAL SEQUENCE
  Synthetic Construct
GKYGLK

SEQ ID NO: 15063 - protein, 6 aa, ARTIFICIAL SEQUENCE
  Synthetic Construct
GKYGNK

SEQ ID NO: 15064 - protein, 6 aa, ARTIFICIAL SEQUENCE
  Synthetic Construct
GKYGQK

SEQ ID NO: 15065 - protein, 6 aa, ARTIFICIAL SEQUENCE
  Synthetic Construct
GKYGRK

SEQ ID NO: 15066 - protein, 6 aa, ARTIFICIAL SEQUENCE
  Synthetic Construct
GKYGSK

SEQ ID NO: 15067 - protein, 6 aa, ARTIFICIAL SEQUENCE
  Synthetic Construct
GKYGTK

SEQ ID NO: 15068 - protein, 6 aa, ARTIFICIAL SEQUENCE
  Synthetic Construct
GKYGYK

SEQ ID NO: 15069 - protein, 6 aa, ARTIFICIAL SEQUENCE
  Synthetic Construct
GKYHAK

SEQ ID NO: 15070 - protein, 6 aa, ARTIFICIAL SEQUENCE
  Synthetic Construct
GKYHDK

SEQ ID NO: 15071 - protein, 6 aa, ARTIFICIAL SEQUENCE
  Synthetic Construct
GKYHEK

SEQ ID NO: 15072 - protein, 6 aa, ARTIFICIAL SEQUENCE
  Synthetic Construct
GKYHFK

SEQ ID NO: 15073 - protein, 6 aa, ARTIFICIAL SEQUENCE
  Synthetic Construct
GKYHGK

SEQ ID NO: 15074 - protein, 6 aa, ARTIFICIAL SEQUENCE
  Synthetic Construct
GKYHHK

SEQ ID NO: 15075 - protein, 6 aa, ARTIFICIAL SEQUENCE
  Synthetic Construct
GKYHIK

SEQ ID NO: 15076 - protein, 6 aa, ARTIFICIAL SEQUENCE
  Synthetic Construct
GKYHLK

SEQ ID NO: 15077 - protein, 6 aa, ARTIFICIAL SEQUENCE
  Synthetic Construct
GKYHNK

SEQ ID NO: 15078 - protein, 6 aa, ARTIFICIAL SEQUENCE
  Synthetic Construct
GKYHQK

SEQ ID NO: 15079 - protein, 6 aa, ARTIFICIAL SEQUENCE
  Synthetic Construct
GKYHRK

SEQ ID NO: 15080 - protein, 6 aa, ARTIFICIAL SEQUENCE
  Synthetic Construct
GKYHSK

SEQ ID NO: 15081 - protein, 6 aa, ARTIFICIAL SEQUENCE
  Synthetic Construct
GKYHTK

SEQ ID NO: 15082 - protein, 6 aa, ARTIFICIAL SEQUENCE
  Synthetic Construct
GKYHYK

SEQ ID NO: 15083 - protein, 6 aa, ARTIFICIAL SEQUENCE
  Synthetic Construct
GKYIAK

SEQ ID NO: 15084 - protein, 6 aa, ARTIFICIAL SEQUENCE
  Synthetic Construct
GKYIDK

SEQ ID NO: 15085 - protein, 6 aa, ARTIFICIAL SEQUENCE
  Synthetic Construct
GKYIEK

SEQ ID NO: 15086 - protein, 6 aa, ARTIFICIAL SEQUENCE
  Synthetic Construct
GKYIFK

SEQ ID NO: 15087 - protein, 6 aa, ARTIFICIAL SEQUENCE
  Synthetic Construct
GKYIGK

SEQ ID NO: 15088 - protein, 6 aa, ARTIFICIAL SEQUENCE
  Synthetic Construct
GKYIHK

SEQ ID NO: 15089 - protein, 6 aa, ARTIFICIAL SEQUENCE
  Synthetic Construct
GKYIIK

SEQ ID NO: 15090 - protein, 6 aa, ARTIFICIAL SEQUENCE
  Synthetic Construct
GKYILK

SEQ ID NO: 15091 - protein, 6 aa, ARTIFICIAL SEQUENCE
  Synthetic Construct
GKYINK

SEQ ID NO: 15092 - protein, 6 aa, ARTIFICIAL SEQUENCE
  Synthetic Construct
GKYIQK

SEQ ID NO: 15093 - protein, 6 aa, ARTIFICIAL SEQUENCE
  Synthetic Construct
GKYIRK

SEQ ID NO: 15094 - protein, 6 aa, ARTIFICIAL SEQUENCE
  Synthetic Construct
GKYISK

SEQ ID NO: 15095 - protein, 6 aa, ARTIFICIAL SEQUENCE
  Synthetic Construct
GKYITK

SEQ ID NO: 15096 - protein, 6 aa, ARTIFICIAL SEQUENCE
  Synthetic Construct
GKYIYK

SEQ ID NO: 15097 - protein, 6 aa, ARTIFICIAL SEQUENCE
  Synthetic Construct
GKYLAK

SEQ ID NO: 15098 - protein, 6 aa, ARTIFICIAL SEQUENCE
  Synthetic Construct
GKYLDK

SEQ ID NO: 15099 - protein, 6 aa, ARTIFICIAL SEQUENCE
  Synthetic Construct
GKYLEK

SEQ ID NO: 15100 - protein, 6 aa, ARTIFICIAL SEQUENCE
  Synthetic Construct
GKYLFK

SEQ ID NO: 15101 - protein, 6 aa, ARTIFICIAL SEQUENCE
  Synthetic Construct
GKYLGK

SEQ ID NO: 15102 - protein, 6 aa, ARTIFICIAL SEQUENCE
  Synthetic Construct
GKYLHK

SEQ ID NO: 15103 - protein, 6 aa, ARTIFICIAL SEQUENCE
  Synthetic Construct
GKYLIK

SEQ ID NO: 15104 - protein, 6 aa, ARTIFICIAL SEQUENCE
  Synthetic Construct
GKYLLK

SEQ ID NO: 15105 - protein, 6 aa, ARTIFICIAL SEQUENCE
  Synthetic Construct
GKYLNK

SEQ ID NO: 15106 - protein, 6 aa, ARTIFICIAL SEQUENCE
  Synthetic Construct
GKYLQK

SEQ ID NO: 15107 - protein, 6 aa, ARTIFICIAL SEQUENCE
  Synthetic Construct
GKYLRK

SEQ ID NO: 15108 - protein, 6 aa, ARTIFICIAL SEQUENCE
  Synthetic Construct
GKYLSK

SEQ ID NO: 15109 - protein, 6 aa, ARTIFICIAL SEQUENCE
  Synthetic Construct
GKYLTK

SEQ ID NO: 15110 - protein, 6 aa, ARTIFICIAL SEQUENCE
  Synthetic Construct
GKYLYK

SEQ ID NO: 15111 - protein, 6 aa, ARTIFICIAL SEQUENCE
  Synthetic Construct
GKYNAK

SEQ ID NO: 15112 - protein, 6 aa, ARTIFICIAL SEQUENCE
  Synthetic Construct
GKYNDK

SEQ ID NO: 15113 - protein, 6 aa, ARTIFICIAL SEQUENCE
  Synthetic Construct
GKYNEK

SEQ ID NO: 15114 - protein, 6 aa, ARTIFICIAL SEQUENCE
  Synthetic Construct
GKYNFK

SEQ ID NO: 15115 - protein, 6 aa, ARTIFICIAL SEQUENCE
  Synthetic Construct
GKYNGK

SEQ ID NO: 15116 - protein, 6 aa, ARTIFICIAL SEQUENCE
  Synthetic Construct
GKYNHK

SEQ ID NO: 15117 - protein, 6 aa, ARTIFICIAL SEQUENCE
  Synthetic Construct
GKYNIK

SEQ ID NO: 15118 - protein, 6 aa, ARTIFICIAL SEQUENCE
  Synthetic Construct
GKYNLK

SEQ ID NO: 15119 - protein, 6 aa, ARTIFICIAL SEQUENCE
  Synthetic Construct
GKYNNK

SEQ ID NO: 15120 - protein, 6 aa, ARTIFICIAL SEQUENCE
  Synthetic Construct
GKYNQK

SEQ ID NO: 15121 - protein, 6 aa, ARTIFICIAL SEQUENCE
  Synthetic Construct
GKYNRK

SEQ ID NO: 15122 - protein, 6 aa, ARTIFICIAL SEQUENCE
  Synthetic Construct
GKYNSK

SEQ ID NO: 15123 - protein, 6 aa, ARTIFICIAL SEQUENCE
  Synthetic Construct
GKYNTK

SEQ ID NO: 15124 - protein, 6 aa, ARTIFICIAL SEQUENCE
  Synthetic Construct
GKYNYK

SEQ ID NO: 15125 - protein, 6 aa, ARTIFICIAL SEQUENCE
  Synthetic Construct
GKYQAK

SEQ ID NO: 15126 - protein, 6 aa, ARTIFICIAL SEQUENCE
  Synthetic Construct
GKYQDK

SEQ ID NO: 15127 - protein, 6 aa, ARTIFICIAL SEQUENCE
  Synthetic Construct
GKYQEK

SEQ ID NO: 15128 - protein, 6 aa, ARTIFICIAL SEQUENCE
  Synthetic Construct
GKYQFK

SEQ ID NO: 15129 - protein, 6 aa, ARTIFICIAL SEQUENCE
  Synthetic Construct
GKYQGK

SEQ ID NO: 15130 - protein, 6 aa, ARTIFICIAL SEQUENCE
  Synthetic Construct
GKYQHK

SEQ ID NO: 15131 - protein, 6 aa, ARTIFICIAL SEQUENCE
  Synthetic Construct
GKYQIK

SEQ ID NO: 15132 - protein, 6 aa, ARTIFICIAL SEQUENCE
  Synthetic Construct
GKYQLK

SEQ ID NO: 15133 - protein, 6 aa, ARTIFICIAL SEQUENCE
  Synthetic Construct
GKYQNK

SEQ ID NO: 15134 - protein, 6 aa, ARTIFICIAL SEQUENCE
  Synthetic Construct
GKYQQK

SEQ ID NO: 15135 - protein, 6 aa, ARTIFICIAL SEQUENCE
  Synthetic Construct
GKYQRK

SEQ ID NO: 15136 - protein, 6 aa, ARTIFICIAL SEQUENCE
  Synthetic Construct
GKYQSK

SEQ ID NO: 15137 - protein, 6 aa, ARTIFICIAL SEQUENCE
  Synthetic Construct
GKYQTK

SEQ ID NO: 15138 - protein, 6 aa, ARTIFICIAL SEQUENCE
  Synthetic Construct
GKYQYK

SEQ ID NO: 15139 - protein, 6 aa, ARTIFICIAL SEQUENCE
  Synthetic Construct
GKYRAK

SEQ ID NO: 15140 - protein, 6 aa, ARTIFICIAL SEQUENCE
  Synthetic Construct
GKYRDK

SEQ ID NO: 15141 - protein, 6 aa, ARTIFICIAL SEQUENCE
  Synthetic Construct
GKYREK

SEQ ID NO: 15142 - protein, 6 aa, ARTIFICIAL SEQUENCE
  Synthetic Construct
GKYRFK

SEQ ID NO: 15143 - protein, 6 aa, ARTIFICIAL SEQUENCE
  Synthetic Construct
GKYRGK

SEQ ID NO: 15144 - protein, 6 aa, ARTIFICIAL SEQUENCE
  Synthetic Construct
GKYRHK

SEQ ID NO: 15145 - protein, 6 aa, ARTIFICIAL SEQUENCE
  Synthetic Construct
GKYRIK

SEQ ID NO: 15146 - protein, 6 aa, ARTIFICIAL SEQUENCE
  Synthetic Construct
GKYRLK

SEQ ID NO: 15147 - protein, 6 aa, ARTIFICIAL SEQUENCE
  Synthetic Construct
GKYRNK

SEQ ID NO: 15148 - protein, 6 aa, ARTIFICIAL SEQUENCE
  Synthetic Construct
GKYRQK

SEQ ID NO: 15149 - protein, 6 aa, ARTIFICIAL SEQUENCE
  Synthetic Construct
GKYRRK

SEQ ID NO: 15150 - protein, 6 aa, ARTIFICIAL SEQUENCE
  Synthetic Construct
GKYRSK

SEQ ID NO: 15151 - protein, 6 aa, ARTIFICIAL SEQUENCE
  Synthetic Construct
GKYRTK

SEQ ID NO: 15152 - protein, 6 aa, ARTIFICIAL SEQUENCE
  Synthetic Construct
GKYRYK

SEQ ID NO: 15153 - protein, 6 aa, ARTIFICIAL SEQUENCE
  Synthetic Construct
GKYSAK

SEQ ID NO: 15154 - protein, 6 aa, ARTIFICIAL SEQUENCE
  Synthetic Construct
GKYSDK

SEQ ID NO: 15155 - protein, 6 aa, ARTIFICIAL SEQUENCE
  Synthetic Construct
GKYSEK

SEQ ID NO: 15156 - protein, 6 aa, ARTIFICIAL SEQUENCE
  Synthetic Construct
GKYSFK

SEQ ID NO: 15157 - protein, 6 aa, ARTIFICIAL SEQUENCE
  Synthetic Construct
GKYSGK

SEQ ID NO: 15158 - protein, 6 aa, ARTIFICIAL SEQUENCE
  Synthetic Construct
GKYSHK

SEQ ID NO: 15159 - protein, 6 aa, ARTIFICIAL SEQUENCE
  Synthetic Construct
GKYSIK

SEQ ID NO: 15160 - protein, 6 aa, ARTIFICIAL SEQUENCE
  Synthetic Construct
GKYSLK

SEQ ID NO: 15161 - protein, 6 aa, ARTIFICIAL SEQUENCE
  Synthetic Construct
GKYSNK

SEQ ID NO: 15162 - protein, 6 aa, ARTIFICIAL SEQUENCE
  Synthetic Construct
GKYSQK

SEQ ID NO: 15163 - protein, 6 aa, ARTIFICIAL SEQUENCE
  Synthetic Construct
GKYSRK

SEQ ID NO: 15164 - protein, 6 aa, ARTIFICIAL SEQUENCE
  Synthetic Construct
GKYSSK

SEQ ID NO: 15165 - protein, 6 aa, ARTIFICIAL SEQUENCE
  Synthetic Construct
GKYSTK

SEQ ID NO: 15166 - protein, 6 aa, ARTIFICIAL SEQUENCE
  Synthetic Construct
GKYSYK

SEQ ID NO: 15167 - protein, 6 aa, ARTIFICIAL SEQUENCE
  Synthetic Construct
GKYTAK

SEQ ID NO: 15168 - protein, 6 aa, ARTIFICIAL SEQUENCE
  Synthetic Construct
GKYTDK

SEQ ID NO: 15169 - protein, 6 aa, ARTIFICIAL SEQUENCE
  Synthetic Construct
GKYTEK

SEQ ID NO: 15170 - protein, 6 aa, ARTIFICIAL SEQUENCE
  Synthetic Construct
GKYTFK

SEQ ID NO: 15171 - protein, 6 aa, ARTIFICIAL SEQUENCE
  Synthetic Construct
GKYTGK

SEQ ID NO: 15172 - protein, 6 aa, ARTIFICIAL SEQUENCE
  Synthetic Construct
GKYTHK

SEQ ID NO: 15173 - protein, 6 aa, ARTIFICIAL SEQUENCE
  Synthetic Construct
GKYTIK

SEQ ID NO: 15174 - protein, 6 aa, ARTIFICIAL SEQUENCE
  Synthetic Construct
GKYTLK

SEQ ID NO: 15175 - protein, 6 aa, ARTIFICIAL SEQUENCE
  Synthetic Construct
GKYTNK

SEQ ID NO: 15176 - protein, 6 aa, ARTIFICIAL SEQUENCE
  Synthetic Construct
GKYTQK

SEQ ID NO: 15177 - protein, 6 aa, ARTIFICIAL SEQUENCE
  Synthetic Construct
GKYTRK

SEQ ID NO: 15178 - protein, 6 aa, ARTIFICIAL SEQUENCE
  Synthetic Construct
GKYTSK

SEQ ID NO: 15179 - protein, 6 aa, ARTIFICIAL SEQUENCE
  Synthetic Construct
GKYTTK

SEQ ID NO: 15180 - protein, 6 aa, ARTIFICIAL SEQUENCE
  Synthetic Construct
GKYTYK

SEQ ID NO: 15181 - protein, 6 aa, ARTIFICIAL SEQUENCE
  Synthetic Construct
GKYYAK

SEQ ID NO: 15182 - protein, 6 aa, ARTIFICIAL SEQUENCE
  Synthetic Construct
GKYYDK

SEQ ID NO: 15183 - protein, 6 aa, ARTIFICIAL SEQUENCE
  Synthetic Construct
GKYYEK

SEQ ID NO: 15184 - protein, 6 aa, ARTIFICIAL SEQUENCE
  Synthetic Construct
GKYYFK

SEQ ID NO: 15185 - protein, 6 aa, ARTIFICIAL SEQUENCE
  Synthetic Construct
GKYYGK

SEQ ID NO: 15186 - protein, 6 aa, ARTIFICIAL SEQUENCE
  Synthetic Construct
GKYYHK

SEQ ID NO: 15187 - protein, 6 aa, ARTIFICIAL SEQUENCE
  Synthetic Construct
GKYYIK

SEQ ID NO: 15188 - protein, 6 aa, ARTIFICIAL SEQUENCE
  Synthetic Construct
GKYYLK

SEQ ID NO: 15189 - protein, 6 aa, ARTIFICIAL SEQUENCE
  Synthetic Construct
GKYYNK

SEQ ID NO: 15190 - protein, 6 aa, ARTIFICIAL SEQUENCE
  Synthetic Construct
GKYYQK

SEQ ID NO: 15191 - protein, 6 aa, ARTIFICIAL SEQUENCE
  Synthetic Construct
GKYYRK

SEQ ID NO: 15192 - protein, 6 aa, ARTIFICIAL SEQUENCE
  Synthetic Construct
GKYYSK

SEQ ID NO: 15193 - protein, 6 aa, ARTIFICIAL SEQUENCE
  Synthetic Construct
GKYYTK

SEQ ID NO: 15194 - protein, 6 aa, ARTIFICIAL SEQUENCE
  Synthetic Construct
GKYYYK

SEQ ID NO: 15195 - protein, 7 aa, ARTIFICIAL SEQUENCE
  Synthetic Construct
RSKAAAK

SEQ ID NO: 15196 - protein, 7 aa, ARTIFICIAL SEQUENCE
  Synthetic Construct
RSKAADK

SEQ ID NO: 15197 - protein, 7 aa, ARTIFICIAL SEQUENCE
  Synthetic Construct
RSKAAEK

SEQ ID NO: 15198 - protein, 7 aa, ARTIFICIAL SEQUENCE
  Synthetic Construct
RSKAAFK

SEQ ID NO: 15199 - protein, 7 aa, ARTIFICIAL SEQUENCE
  Synthetic Construct
RSKAAGK

SEQ ID NO: 15200 - protein, 7 aa, ARTIFICIAL SEQUENCE
  Synthetic Construct
RSKAAHK

SEQ ID NO: 15201 - protein, 7 aa, ARTIFICIAL SEQUENCE
  Synthetic Construct
RSKAAIK

SEQ ID NO: 15202 - protein, 7 aa, ARTIFICIAL SEQUENCE
  Synthetic Construct
RSKAALK

SEQ ID NO: 15203 - protein, 7 aa, ARTIFICIAL SEQUENCE
  Synthetic Construct
RSKAANK

SEQ ID NO: 15204 - protein, 7 aa, ARTIFICIAL SEQUENCE
  Synthetic Construct
RSKAAQK

SEQ ID NO: 15205 - protein, 7 aa, ARTIFICIAL SEQUENCE
  Synthetic Construct
RSKAARK

SEQ ID NO: 15206 - protein, 7 aa, ARTIFICIAL SEQUENCE
  Synthetic Construct
RSKAASK

SEQ ID NO: 15207 - protein, 7 aa, ARTIFICIAL SEQUENCE
  Synthetic Construct
RSKAATK

SEQ ID NO: 15208 - protein, 7 aa, ARTIFICIAL SEQUENCE
  Synthetic Construct
RSKAAYK

SEQ ID NO: 15209 - protein, 7 aa, ARTIFICIAL SEQUENCE
  Synthetic Construct
RSKADAK

SEQ ID NO: 15210 - protein, 7 aa, ARTIFICIAL SEQUENCE
  Synthetic Construct
RSKADDK

SEQ ID NO: 15211 - protein, 7 aa, ARTIFICIAL SEQUENCE
  Synthetic Construct
RSKADEK

SEQ ID NO: 15212 - protein, 7 aa, ARTIFICIAL SEQUENCE
  Synthetic Construct
RSKADFK

SEQ ID NO: 15213 - protein, 7 aa, ARTIFICIAL SEQUENCE
  Synthetic Construct
RSKADGK

SEQ ID NO: 15214 - protein, 7 aa, ARTIFICIAL SEQUENCE
  Synthetic Construct
RSKADHK

SEQ ID NO: 15215 - protein, 7 aa, ARTIFICIAL SEQUENCE
  Synthetic Construct
RSKADIK

SEQ ID NO: 15216 - protein, 7 aa, ARTIFICIAL SEQUENCE
  Synthetic Construct
RSKADLK

SEQ ID NO: 15217 - protein, 7 aa, ARTIFICIAL SEQUENCE
  Synthetic Construct
RSKADNK

SEQ ID NO: 15218 - protein, 7 aa, ARTIFICIAL SEQUENCE
  Synthetic Construct
RSKADQK

SEQ ID NO: 15219 - protein, 7 aa, ARTIFICIAL SEQUENCE
  Synthetic Construct
RSKADRK

SEQ ID NO: 15220 - protein, 7 aa, ARTIFICIAL SEQUENCE
  Synthetic Construct
RSKADSK

SEQ ID NO: 15221 - protein, 7 aa, ARTIFICIAL SEQUENCE
  Synthetic Construct
RSKADTK

SEQ ID NO: 15222 - protein, 7 aa, ARTIFICIAL SEQUENCE
  Synthetic Construct
RSKADYK

SEQ ID NO: 15223 - protein, 7 aa, ARTIFICIAL SEQUENCE
  Synthetic Construct
RSKAEAK

SEQ ID NO: 15224 - protein, 7 aa, ARTIFICIAL SEQUENCE
  Synthetic Construct
RSKAEDK

SEQ ID NO: 15225 - protein, 7 aa, ARTIFICIAL SEQUENCE
  Synthetic Construct
RSKAEEK

SEQ ID NO: 15226 - protein, 7 aa, ARTIFICIAL SEQUENCE
  Synthetic Construct
RSKAEFK

SEQ ID NO: 15227 - protein, 7 aa, ARTIFICIAL SEQUENCE
  Synthetic Construct
RSKAEGK

SEQ ID NO: 15228 - protein, 7 aa, ARTIFICIAL SEQUENCE
  Synthetic Construct
RSKAEHK

SEQ ID NO: 15229 - protein, 7 aa, ARTIFICIAL SEQUENCE
  Synthetic Construct
RSKAEIK

SEQ ID NO: 15230 - protein, 7 aa, ARTIFICIAL SEQUENCE
  Synthetic Construct
RSKAELK

SEQ ID NO: 15231 - protein, 7 aa, ARTIFICIAL SEQUENCE
  Synthetic Construct
RSKAENK

SEQ ID NO: 15232 - protein, 7 aa, ARTIFICIAL SEQUENCE
  Synthetic Construct
RSKAEQK

SEQ ID NO: 15233 - protein, 7 aa, ARTIFICIAL SEQUENCE
  Synthetic Construct
RSKAERK

SEQ ID NO: 15234 - protein, 7 aa, ARTIFICIAL SEQUENCE
  Synthetic Construct
RSKAESK

SEQ ID NO: 15235 - protein, 7 aa, ARTIFICIAL SEQUENCE
  Synthetic Construct
RSKAETK

SEQ ID NO: 15236 - protein, 7 aa, ARTIFICIAL SEQUENCE
  Synthetic Construct
RSKAEYK

SEQ ID NO: 15237 - protein, 7 aa, ARTIFICIAL SEQUENCE
  Synthetic Construct
RSKAFAK

SEQ ID NO: 15238 - protein, 7 aa, ARTIFICIAL SEQUENCE
  Synthetic Construct
RSKAFDK

SEQ ID NO: 15239 - protein, 7 aa, ARTIFICIAL SEQUENCE
  Synthetic Construct
RSKAFEK

SEQ ID NO: 15240 - protein, 7 aa, ARTIFICIAL SEQUENCE
  Synthetic Construct
RSKAFFK

SEQ ID NO: 15241 - protein, 7 aa, ARTIFICIAL SEQUENCE
  Synthetic Construct
RSKAFGK

SEQ ID NO: 15242 - protein, 7 aa, ARTIFICIAL SEQUENCE
  Synthetic Construct
RSKAFHK

SEQ ID NO: 15243 - protein, 7 aa, ARTIFICIAL SEQUENCE
  Synthetic Construct
RSKAFIK

SEQ ID NO: 15244 - protein, 7 aa, ARTIFICIAL SEQUENCE
  Synthetic Construct
RSKAFLK

SEQ ID NO: 15245 - protein, 7 aa, ARTIFICIAL SEQUENCE
  Synthetic Construct
RSKAFNK

SEQ ID NO: 15246 - protein, 7 aa, ARTIFICIAL SEQUENCE
  Synthetic Construct
RSKAFQK

SEQ ID NO: 15247 - protein, 7 aa, ARTIFICIAL SEQUENCE
  Synthetic Construct
RSKAFRK

SEQ ID NO: 15248 - protein, 7 aa, ARTIFICIAL SEQUENCE
  Synthetic Construct
RSKAFSK

SEQ ID NO: 15249 - protein, 7 aa, ARTIFICIAL SEQUENCE
  Synthetic Construct
RSKAFTK

SEQ ID NO: 15250 - protein, 7 aa, ARTIFICIAL SEQUENCE
  Synthetic Construct
RSKAFYK

SEQ ID NO: 15251 - protein, 7 aa, ARTIFICIAL SEQUENCE
  Synthetic Construct
RSKAGAK

SEQ ID NO: 15252 - protein, 7 aa, ARTIFICIAL SEQUENCE
  Synthetic Construct
RSKAGDK

SEQ ID NO: 15253 - protein, 7 aa, ARTIFICIAL SEQUENCE
  Synthetic Construct
RSKAGEK

SEQ ID NO: 15254 - protein, 7 aa, ARTIFICIAL SEQUENCE
  Synthetic Construct
RSKAGFK

SEQ ID NO: 15255 - protein, 7 aa, ARTIFICIAL SEQUENCE
  Synthetic Construct
RSKAGGK

SEQ ID NO: 15256 - protein, 7 aa, ARTIFICIAL SEQUENCE
  Synthetic Construct
RSKAGHK

SEQ ID NO: 15257 - protein, 7 aa, ARTIFICIAL SEQUENCE
  Synthetic Construct
RSKAGIK

SEQ ID NO: 15258 - protein, 7 aa, ARTIFICIAL SEQUENCE
  Synthetic Construct
RSKAGLK

SEQ ID NO: 15259 - protein, 7 aa, ARTIFICIAL SEQUENCE
  Synthetic Construct
RSKAGNK

SEQ ID NO: 15260 - protein, 7 aa, ARTIFICIAL SEQUENCE
  Synthetic Construct
RSKAGQK

SEQ ID NO: 15261 - protein, 7 aa, ARTIFICIAL SEQUENCE
  Synthetic Construct
RSKAGRK

SEQ ID NO: 15262 - protein, 7 aa, ARTIFICIAL SEQUENCE
  Synthetic Construct
RSKAGSK

SEQ ID NO: 15263 - protein, 7 aa, ARTIFICIAL SEQUENCE
  Synthetic Construct
RSKAGTK

SEQ ID NO: 15264 - protein, 7 aa, ARTIFICIAL SEQUENCE
  Synthetic Construct
RSKAGYK

SEQ ID NO: 15265 - protein, 7 aa, ARTIFICIAL SEQUENCE
  Synthetic Construct
RSKAHAK

SEQ ID NO: 15266 - protein, 7 aa, ARTIFICIAL SEQUENCE
  Synthetic Construct
RSKAHDK

SEQ ID NO: 15267 - protein, 7 aa, ARTIFICIAL SEQUENCE
  Synthetic Construct
RSKAHEK

SEQ ID NO: 15268 - protein, 7 aa, ARTIFICIAL SEQUENCE
  Synthetic Construct
RSKAHFK

SEQ ID NO: 15269 - protein, 7 aa, ARTIFICIAL SEQUENCE
  Synthetic Construct
RSKAHGK

SEQ ID NO: 15270 - protein, 7 aa, ARTIFICIAL SEQUENCE
  Synthetic Construct
RSKAHHK

SEQ ID NO: 15271 - protein, 7 aa, ARTIFICIAL SEQUENCE
  Synthetic Construct
RSKAHIK

SEQ ID NO: 15272 - protein, 7 aa, ARTIFICIAL SEQUENCE
  Synthetic Construct
RSKAHLK

SEQ ID NO: 15273 - protein, 7 aa, ARTIFICIAL SEQUENCE
  Synthetic Construct
RSKAHNK

SEQ ID NO: 15274 - protein, 7 aa, ARTIFICIAL SEQUENCE
  Synthetic Construct
RSKAHQK

SEQ ID NO: 15275 - protein, 7 aa, ARTIFICIAL SEQUENCE
  Synthetic Construct
RSKAHRK

SEQ ID NO: 15276 - protein, 7 aa, ARTIFICIAL SEQUENCE
  Synthetic Construct
RSKAHSK

SEQ ID NO: 15277 - protein, 7 aa, ARTIFICIAL SEQUENCE
  Synthetic Construct
RSKAHTK

SEQ ID NO: 15278 - protein, 7 aa, ARTIFICIAL SEQUENCE
  Synthetic Construct
RSKAHYK

SEQ ID NO: 15279 - protein, 7 aa, ARTIFICIAL SEQUENCE
  Synthetic Construct
RSKAIAK

SEQ ID NO: 15280 - protein, 7 aa, ARTIFICIAL SEQUENCE
  Synthetic Construct
RSKAIDK

SEQ ID NO: 15281 - protein, 7 aa, ARTIFICIAL SEQUENCE
  Synthetic Construct
RSKAIEK

SEQ ID NO: 15282 - protein, 7 aa, ARTIFICIAL SEQUENCE
  Synthetic Construct
RSKAIFK

SEQ ID NO: 15283 - protein, 7 aa, ARTIFICIAL SEQUENCE
  Synthetic Construct
RSKAIGK

SEQ ID NO: 15284 - protein, 7 aa, ARTIFICIAL SEQUENCE
  Synthetic Construct
RSKAIHK

SEQ ID NO: 15285 - protein, 7 aa, ARTIFICIAL SEQUENCE
  Synthetic Construct
RSKAIIK

SEQ ID NO: 15286 - protein, 7 aa, ARTIFICIAL SEQUENCE
  Synthetic Construct
RSKAILK

SEQ ID NO: 15287 - protein, 7 aa, ARTIFICIAL SEQUENCE
  Synthetic Construct
RSKAINK

SEQ ID NO: 15288 - protein, 7 aa, ARTIFICIAL SEQUENCE
  Synthetic Construct
RSKAIQK

SEQ ID NO: 15289 - protein, 7 aa, ARTIFICIAL SEQUENCE
  Synthetic Construct
RSKAIRK

SEQ ID NO: 15290 - protein, 7 aa, ARTIFICIAL SEQUENCE
  Synthetic Construct
RSKAISK

SEQ ID NO: 15291 - protein, 7 aa, ARTIFICIAL SEQUENCE
  Synthetic Construct
RSKAITK

SEQ ID NO: 15292 - protein, 7 aa, ARTIFICIAL SEQUENCE
  Synthetic Construct
RSKAIYK

SEQ ID NO: 15293 - protein, 7 aa, ARTIFICIAL SEQUENCE
  Synthetic Construct
RSKALAK

SEQ ID NO: 15294 - protein, 7 aa, ARTIFICIAL SEQUENCE
  Synthetic Construct
RSKALDK

SEQ ID NO: 15295 - protein, 7 aa, ARTIFICIAL SEQUENCE
  Synthetic Construct
RSKALEK

SEQ ID NO: 15296 - protein, 7 aa, ARTIFICIAL SEQUENCE
  Synthetic Construct
RSKALFK

SEQ ID NO: 15297 - protein, 7 aa, ARTIFICIAL SEQUENCE
  Synthetic Construct
RSKALGK

SEQ ID NO: 15298 - protein, 7 aa, ARTIFICIAL SEQUENCE
  Synthetic Construct
RSKALHK

SEQ ID NO: 15299 - protein, 7 aa, ARTIFICIAL SEQUENCE
  Synthetic Construct
RSKALIK

SEQ ID NO: 15300 - protein, 7 aa, ARTIFICIAL SEQUENCE
  Synthetic Construct
RSKALLK

SEQ ID NO: 15301 - protein, 7 aa, ARTIFICIAL SEQUENCE
  Synthetic Construct
RSKALNK

SEQ ID NO: 15302 - protein, 7 aa, ARTIFICIAL SEQUENCE
  Synthetic Construct
RSKALQK

SEQ ID NO: 15303 - protein, 7 aa, ARTIFICIAL SEQUENCE
  Synthetic Construct
RSKALRK

SEQ ID NO: 15304 - protein, 7 aa, ARTIFICIAL SEQUENCE
  Synthetic Construct
RSKALSK

SEQ ID NO: 15305 - protein, 7 aa, ARTIFICIAL SEQUENCE
  Synthetic Construct
RSKALTK

SEQ ID NO: 15306 - protein, 7 aa, ARTIFICIAL SEQUENCE
  Synthetic Construct
RSKALYK

SEQ ID NO: 15307 - protein, 7 aa, ARTIFICIAL SEQUENCE
  Synthetic Construct
RSKANAK

SEQ ID NO: 15308 - protein, 7 aa, ARTIFICIAL SEQUENCE
  Synthetic Construct
RSKANDK

SEQ ID NO: 15309 - protein, 7 aa, ARTIFICIAL SEQUENCE
  Synthetic Construct
RSKANEK

SEQ ID NO: 15310 - protein, 7 aa, ARTIFICIAL SEQUENCE
  Synthetic Construct
RSKANFK

SEQ ID NO: 15311 - protein, 7 aa, ARTIFICIAL SEQUENCE
  Synthetic Construct
RSKANGK

SEQ ID NO: 15312 - protein, 7 aa, ARTIFICIAL SEQUENCE
  Synthetic Construct
RSKANHK

SEQ ID NO: 15313 - protein, 7 aa, ARTIFICIAL SEQUENCE
  Synthetic Construct
RSKANIK

SEQ ID NO: 15314 - protein, 7 aa, ARTIFICIAL SEQUENCE
  Synthetic Construct
RSKANLK

SEQ ID NO: 15315 - protein, 7 aa, ARTIFICIAL SEQUENCE
  Synthetic Construct
RSKANNK

SEQ ID NO: 15316 - protein, 7 aa, ARTIFICIAL SEQUENCE
  Synthetic Construct
RSKANQK

SEQ ID NO: 15317 - protein, 7 aa, ARTIFICIAL SEQUENCE
  Synthetic Construct
RSKANRK

SEQ ID NO: 15318 - protein, 7 aa, ARTIFICIAL SEQUENCE
  Synthetic Construct
RSKANSK

SEQ ID NO: 15319 - protein, 7 aa, ARTIFICIAL SEQUENCE
  Synthetic Construct
RSKANTK

SEQ ID NO: 15320 - protein, 7 aa, ARTIFICIAL SEQUENCE
  Synthetic Construct
RSKANYK

SEQ ID NO: 15321 - protein, 7 aa, ARTIFICIAL SEQUENCE
  Synthetic Construct
RSKAQAK

SEQ ID NO: 15322 - protein, 7 aa, ARTIFICIAL SEQUENCE
  Synthetic Construct
RSKAQDK

SEQ ID NO: 15323 - protein, 7 aa, ARTIFICIAL SEQUENCE
  Synthetic Construct
RSKAQEK

SEQ ID NO: 15324 - protein, 7 aa, ARTIFICIAL SEQUENCE
  Synthetic Construct
RSKAQFK

SEQ ID NO: 15325 - protein, 7 aa, ARTIFICIAL SEQUENCE
  Synthetic Construct
RSKAQGK

SEQ ID NO: 15326 - protein, 7 aa, ARTIFICIAL SEQUENCE
  Synthetic Construct
RSKAQHK

SEQ ID NO: 15327 - protein, 7 aa, ARTIFICIAL SEQUENCE
  Synthetic Construct
RSKAQIK

SEQ ID NO: 15328 - protein, 7 aa, ARTIFICIAL SEQUENCE
  Synthetic Construct
RSKAQLK

SEQ ID NO: 15329 - protein, 7 aa, ARTIFICIAL SEQUENCE
  Synthetic Construct
RSKAQNK

SEQ ID NO: 15330 - protein, 7 aa, ARTIFICIAL SEQUENCE
  Synthetic Construct
RSKAQQK

SEQ ID NO: 15331 - protein, 7 aa, ARTIFICIAL SEQUENCE
  Synthetic Construct
RSKAQRK

SEQ ID NO: 15332 - protein, 7 aa, ARTIFICIAL SEQUENCE
  Synthetic Construct
RSKAQSK

SEQ ID NO: 15333 - protein, 7 aa, ARTIFICIAL SEQUENCE
  Synthetic Construct
RSKAQTK

SEQ ID NO: 15334 - protein, 7 aa, ARTIFICIAL SEQUENCE
  Synthetic Construct
RSKAQYK

SEQ ID NO: 15335 - protein, 7 aa, ARTIFICIAL SEQUENCE
  Synthetic Construct
RSKARAK

SEQ ID NO: 15336 - protein, 7 aa, ARTIFICIAL SEQUENCE
  Synthetic Construct
RSKARDK

SEQ ID NO: 15337 - protein, 7 aa, ARTIFICIAL SEQUENCE
  Synthetic Construct
RSKAREK

SEQ ID NO: 15338 - protein, 7 aa, ARTIFICIAL SEQUENCE
  Synthetic Construct
RSKARFK

SEQ ID NO: 15339 - protein, 7 aa, ARTIFICIAL SEQUENCE
  Synthetic Construct
RSKARGK

SEQ ID NO: 15340 - protein, 7 aa, ARTIFICIAL SEQUENCE
  Synthetic Construct
RSKARHK

SEQ ID NO: 15341 - protein, 7 aa, ARTIFICIAL SEQUENCE
  Synthetic Construct
RSKARIK

SEQ ID NO: 15342 - protein, 7 aa, ARTIFICIAL SEQUENCE
  Synthetic Construct
RSKARLK

SEQ ID NO: 15343 - protein, 7 aa, ARTIFICIAL SEQUENCE
  Synthetic Construct
RSKARNK

SEQ ID NO: 15344 - protein, 7 aa, ARTIFICIAL SEQUENCE
  Synthetic Construct
RSKARQK

SEQ ID NO: 15345 - protein, 7 aa, ARTIFICIAL SEQUENCE
  Synthetic Construct
RSKARRK

SEQ ID NO: 15346 - protein, 7 aa, ARTIFICIAL SEQUENCE
  Synthetic Construct
RSKARSK

SEQ ID NO: 15347 - protein, 7 aa, ARTIFICIAL SEQUENCE
  Synthetic Construct
RSKARTK

SEQ ID NO: 15348 - protein, 7 aa, ARTIFICIAL SEQUENCE
  Synthetic Construct
RSKARYK

SEQ ID NO: 15349 - protein, 7 aa, ARTIFICIAL SEQUENCE
  Synthetic Construct
RSKASAK

SEQ ID NO: 15350 - protein, 7 aa, ARTIFICIAL SEQUENCE
  Synthetic Construct
RSKASDK

SEQ ID NO: 15351 - protein, 7 aa, ARTIFICIAL SEQUENCE
  Synthetic Construct
RSKASEK

SEQ ID NO: 15352 - protein, 7 aa, ARTIFICIAL SEQUENCE
  Synthetic Construct
RSKASFK

SEQ ID NO: 15353 - protein, 7 aa, ARTIFICIAL SEQUENCE
  Synthetic Construct
RSKASGK

SEQ ID NO: 15354 - protein, 7 aa, ARTIFICIAL SEQUENCE
  Synthetic Construct
RSKASHK

SEQ ID NO: 15355 - protein, 7 aa, ARTIFICIAL SEQUENCE
  Synthetic Construct
RSKASIK

SEQ ID NO: 15356 - protein, 7 aa, ARTIFICIAL SEQUENCE
  Synthetic Construct
RSKASLK

SEQ ID NO: 15357 - protein, 7 aa, ARTIFICIAL SEQUENCE
  Synthetic Construct
RSKASNK

SEQ ID NO: 15358 - protein, 7 aa, ARTIFICIAL SEQUENCE
  Synthetic Construct
RSKASQK

SEQ ID NO: 15359 - protein, 7 aa, ARTIFICIAL SEQUENCE
  Synthetic Construct
RSKASRK

SEQ ID NO: 15360 - protein, 7 aa, ARTIFICIAL SEQUENCE
  Synthetic Construct
RSKASSK

SEQ ID NO: 15361 - protein, 7 aa, ARTIFICIAL SEQUENCE
  Synthetic Construct
RSKASTK

SEQ ID NO: 15362 - protein, 7 aa, ARTIFICIAL SEQUENCE
  Synthetic Construct
RSKASYK

SEQ ID NO: 15363 - protein, 7 aa, ARTIFICIAL SEQUENCE
  Synthetic Construct
RSKATAK

SEQ ID NO: 15364 - protein, 7 aa, ARTIFICIAL SEQUENCE
  Synthetic Construct
RSKATDK

SEQ ID NO: 15365 - protein, 7 aa, ARTIFICIAL SEQUENCE
  Synthetic Construct
RSKATEK

SEQ ID NO: 15366 - protein, 7 aa, ARTIFICIAL SEQUENCE
  Synthetic Construct
RSKATFK

SEQ ID NO: 15367 - protein, 7 aa, ARTIFICIAL SEQUENCE
  Synthetic Construct
RSKATGK

SEQ ID NO: 15368 - protein, 7 aa, ARTIFICIAL SEQUENCE
  Synthetic Construct
RSKATHK

SEQ ID NO: 15369 - protein, 7 aa, ARTIFICIAL SEQUENCE
  Synthetic Construct
RSKATIK

SEQ ID NO: 15370 - protein, 7 aa, ARTIFICIAL SEQUENCE
  Synthetic Construct
RSKATLK

SEQ ID NO: 15371 - protein, 7 aa, ARTIFICIAL SEQUENCE
  Synthetic Construct
RSKATNK

SEQ ID NO: 15372 - protein, 7 aa, ARTIFICIAL SEQUENCE
  Synthetic Construct
RSKATQK

SEQ ID NO: 15373 - protein, 7 aa, ARTIFICIAL SEQUENCE
  Synthetic Construct
RSKATRK

SEQ ID NO: 15374 - protein, 7 aa, ARTIFICIAL SEQUENCE
  Synthetic Construct
RSKATSK

SEQ ID NO: 15375 - protein, 7 aa, ARTIFICIAL SEQUENCE
  Synthetic Construct
RSKATTK

SEQ ID NO: 15376 - protein, 7 aa, ARTIFICIAL SEQUENCE
  Synthetic Construct
RSKATYK

SEQ ID NO: 15377 - protein, 7 aa, ARTIFICIAL SEQUENCE
  Synthetic Construct
RSKAYAK

SEQ ID NO: 15378 - protein, 7 aa, ARTIFICIAL SEQUENCE
  Synthetic Construct
RSKAYDK

SEQ ID NO: 15379 - protein, 7 aa, ARTIFICIAL SEQUENCE
  Synthetic Construct
RSKAYEK

SEQ ID NO: 15380 - protein, 7 aa, ARTIFICIAL SEQUENCE
  Synthetic Construct
RSKAYFK

SEQ ID NO: 15381 - protein, 7 aa, ARTIFICIAL SEQUENCE
  Synthetic Construct
RSKAYGK

SEQ ID NO: 15382 - protein, 7 aa, ARTIFICIAL SEQUENCE
  Synthetic Construct
RSKAYHK

SEQ ID NO: 15383 - protein, 7 aa, ARTIFICIAL SEQUENCE
  Synthetic Construct
RSKAYIK

SEQ ID NO: 15384 - protein, 7 aa, ARTIFICIAL SEQUENCE
  Synthetic Construct
RSKAYLK

SEQ ID NO: 15385 - protein, 7 aa, ARTIFICIAL SEQUENCE
  Synthetic Construct
RSKAYNK

SEQ ID NO: 15386 - protein, 7 aa, ARTIFICIAL SEQUENCE
  Synthetic Construct
RSKAYQK

SEQ ID NO: 15387 - protein, 7 aa, ARTIFICIAL SEQUENCE
  Synthetic Construct
RSKAYRK

SEQ ID NO: 15388 - protein, 7 aa, ARTIFICIAL SEQUENCE
  Synthetic Construct
RSKAYSK

SEQ ID NO: 15389 - protein, 7 aa, ARTIFICIAL SEQUENCE
  Synthetic Construct
RSKAYTK

SEQ ID NO: 15390 - protein, 7 aa, ARTIFICIAL SEQUENCE
  Synthetic Construct
RSKAYYK

SEQ ID NO: 15391 - protein, 7 aa, ARTIFICIAL SEQUENCE
  Synthetic Construct
RSKDAAK

SEQ ID NO: 15392 - protein, 7 aa, ARTIFICIAL SEQUENCE
  Synthetic Construct
RSKDADK

SEQ ID NO: 15393 - protein, 7 aa, ARTIFICIAL SEQUENCE
  Synthetic Construct
RSKDAEK

SEQ ID NO: 15394 - protein, 7 aa, ARTIFICIAL SEQUENCE
  Synthetic Construct
RSKDAFK

SEQ ID NO: 15395 - protein, 7 aa, ARTIFICIAL SEQUENCE
  Synthetic Construct
RSKDAGK

SEQ ID NO: 15396 - protein, 7 aa, ARTIFICIAL SEQUENCE
  Synthetic Construct
RSKDAHK

SEQ ID NO: 15397 - protein, 7 aa, ARTIFICIAL SEQUENCE
  Synthetic Construct
RSKDAIK

SEQ ID NO: 15398 - protein, 7 aa, ARTIFICIAL SEQUENCE
  Synthetic Construct
RSKDALK

SEQ ID NO: 15399 - protein, 7 aa, ARTIFICIAL SEQUENCE
  Synthetic Construct
RSKDANK

SEQ ID NO: 15400 - protein, 7 aa, ARTIFICIAL SEQUENCE
  Synthetic Construct
RSKDAQK

SEQ ID NO: 15401 - protein, 7 aa, ARTIFICIAL SEQUENCE
  Synthetic Construct
RSKDARK

SEQ ID NO: 15402 - protein, 7 aa, ARTIFICIAL SEQUENCE
  Synthetic Construct
RSKDASK

SEQ ID NO: 15403 - protein, 7 aa, ARTIFICIAL SEQUENCE
  Synthetic Construct
RSKDATK

SEQ ID NO: 15404 - protein, 7 aa, ARTIFICIAL SEQUENCE
  Synthetic Construct
RSKDAYK

SEQ ID NO: 15405 - protein, 7 aa, ARTIFICIAL SEQUENCE
  Synthetic Construct
RSKDDAK

SEQ ID NO: 15406 - protein, 7 aa, ARTIFICIAL SEQUENCE
  Synthetic Construct
RSKDDDK

SEQ ID NO: 15407 - protein, 7 aa, ARTIFICIAL SEQUENCE
  Synthetic Construct
RSKDDEK

SEQ ID NO: 15408 - protein, 7 aa, ARTIFICIAL SEQUENCE
  Synthetic Construct
RSKDDFK

SEQ ID NO: 15409 - protein, 7 aa, ARTIFICIAL SEQUENCE
  Synthetic Construct
RSKDDGK

SEQ ID NO: 15410 - protein, 7 aa, ARTIFICIAL SEQUENCE
  Synthetic Construct
RSKDDHK

SEQ ID NO: 15411 - protein, 7 aa, ARTIFICIAL SEQUENCE
  Synthetic Construct
RSKDDIK

SEQ ID NO: 15412 - protein, 7 aa, ARTIFICIAL SEQUENCE
  Synthetic Construct
RSKDDLK

SEQ ID NO: 15413 - protein, 7 aa, ARTIFICIAL SEQUENCE
  Synthetic Construct
RSKDDNK

SEQ ID NO: 15414 - protein, 7 aa, ARTIFICIAL SEQUENCE
  Synthetic Construct
RSKDDQK

SEQ ID NO: 15415 - protein, 7 aa, ARTIFICIAL SEQUENCE
  Synthetic Construct
RSKDDRK

SEQ ID NO: 15416 - protein, 7 aa, ARTIFICIAL SEQUENCE
  Synthetic Construct
RSKDDSK

SEQ ID NO: 15417 - protein, 7 aa, ARTIFICIAL SEQUENCE
  Synthetic Construct
RSKDDTK

SEQ ID NO: 15418 - protein, 7 aa, ARTIFICIAL SEQUENCE
  Synthetic Construct
RSKDDYK

SEQ ID NO: 15419 - protein, 7 aa, ARTIFICIAL SEQUENCE
  Synthetic Construct
RSKDEAK

SEQ ID NO: 15420 - protein, 7 aa, ARTIFICIAL SEQUENCE
  Synthetic Construct
RSKDEDK

SEQ ID NO: 15421 - protein, 7 aa, ARTIFICIAL SEQUENCE
  Synthetic Construct
RSKDEEK

SEQ ID NO: 15422 - protein, 7 aa, ARTIFICIAL SEQUENCE
  Synthetic Construct
RSKDEFK

SEQ ID NO: 15423 - protein, 7 aa, ARTIFICIAL SEQUENCE
  Synthetic Construct
RSKDEGK

SEQ ID NO: 15424 - protein, 7 aa, ARTIFICIAL SEQUENCE
  Synthetic Construct
RSKDEHK

SEQ ID NO: 15425 - protein, 7 aa, ARTIFICIAL SEQUENCE
  Synthetic Construct
RSKDEIK

SEQ ID NO: 15426 - protein, 7 aa, ARTIFICIAL SEQUENCE
  Synthetic Construct
RSKDELK

SEQ ID NO: 15427 - protein, 7 aa, ARTIFICIAL SEQUENCE
  Synthetic Construct
RSKDENK

SEQ ID NO: 15428 - protein, 7 aa, ARTIFICIAL SEQUENCE
  Synthetic Construct
RSKDEQK

SEQ ID NO: 15429 - protein, 7 aa, ARTIFICIAL SEQUENCE
  Synthetic Construct
RSKDERK

SEQ ID NO: 15430 - protein, 7 aa, ARTIFICIAL SEQUENCE
  Synthetic Construct
RSKDESK

SEQ ID NO: 15431 - protein, 7 aa, ARTIFICIAL SEQUENCE
  Synthetic Construct
RSKDETK

SEQ ID NO: 15432 - protein, 7 aa, ARTIFICIAL SEQUENCE
  Synthetic Construct
RSKDEYK

SEQ ID NO: 15433 - protein, 7 aa, ARTIFICIAL SEQUENCE
  Synthetic Construct
RSKDFAK

SEQ ID NO: 15434 - protein, 7 aa, ARTIFICIAL SEQUENCE
  Synthetic Construct
RSKDFDK

SEQ ID NO: 15435 - protein, 7 aa, ARTIFICIAL SEQUENCE
  Synthetic Construct
RSKDFEK

SEQ ID NO: 15436 - protein, 7 aa, ARTIFICIAL SEQUENCE
  Synthetic Construct
RSKDFFK

SEQ ID NO: 15437 - protein, 7 aa, ARTIFICIAL SEQUENCE
  Synthetic Construct
RSKDFGK

SEQ ID NO: 15438 - protein, 7 aa, ARTIFICIAL SEQUENCE
  Synthetic Construct
RSKDFHK

SEQ ID NO: 15439 - protein, 7 aa, ARTIFICIAL SEQUENCE
  Synthetic Construct
RSKDFIK

SEQ ID NO: 15440 - protein, 7 aa, ARTIFICIAL SEQUENCE
  Synthetic Construct
RSKDFLK

SEQ ID NO: 15441 - protein, 7 aa, ARTIFICIAL SEQUENCE
  Synthetic Construct
RSKDFNK

SEQ ID NO: 15442 - protein, 7 aa, ARTIFICIAL SEQUENCE
  Synthetic Construct
RSKDFQK

SEQ ID NO: 15443 - protein, 7 aa, ARTIFICIAL SEQUENCE
  Synthetic Construct
RSKDFRK

SEQ ID NO: 15444 - protein, 7 aa, ARTIFICIAL SEQUENCE
  Synthetic Construct
RSKDFSK

SEQ ID NO: 15445 - protein, 7 aa, ARTIFICIAL SEQUENCE
  Synthetic Construct
RSKDFTK

SEQ ID NO: 15446 - protein, 7 aa, ARTIFICIAL SEQUENCE
  Synthetic Construct
RSKDFYK

SEQ ID NO: 15447 - protein, 7 aa, ARTIFICIAL SEQUENCE
  Synthetic Construct
RSKDGAK

SEQ ID NO: 15448 - protein, 7 aa, ARTIFICIAL SEQUENCE
  Synthetic Construct
RSKDGDK

SEQ ID NO: 15449 - protein, 7 aa, ARTIFICIAL SEQUENCE
  Synthetic Construct
RSKDGEK

SEQ ID NO: 15450 - protein, 7 aa, ARTIFICIAL SEQUENCE
  Synthetic Construct
RSKDGFK

SEQ ID NO: 15451 - protein, 7 aa, ARTIFICIAL SEQUENCE
  Synthetic Construct
RSKDGGK

SEQ ID NO: 15452 - protein, 7 aa, ARTIFICIAL SEQUENCE
  Synthetic Construct
RSKDGHK

SEQ ID NO: 15453 - protein, 7 aa, ARTIFICIAL SEQUENCE
  Synthetic Construct
RSKDGIK

SEQ ID NO: 15454 - protein, 7 aa, ARTIFICIAL SEQUENCE
  Synthetic Construct
RSKDGLK

SEQ ID NO: 15455 - protein, 7 aa, ARTIFICIAL SEQUENCE
  Synthetic Construct
RSKDGNK

SEQ ID NO: 15456 - protein, 7 aa, ARTIFICIAL SEQUENCE
  Synthetic Construct
RSKDGQK

SEQ ID NO: 15457 - protein, 7 aa, ARTIFICIAL SEQUENCE
  Synthetic Construct
RSKDGRK

SEQ ID NO: 15458 - protein, 7 aa, ARTIFICIAL SEQUENCE
  Synthetic Construct
RSKDGSK

SEQ ID NO: 15459 - protein, 7 aa, ARTIFICIAL SEQUENCE
  Synthetic Construct
RSKDGTK

SEQ ID NO: 15460 - protein, 7 aa, ARTIFICIAL SEQUENCE
  Synthetic Construct
RSKDGYK

SEQ ID NO: 15461 - protein, 7 aa, ARTIFICIAL SEQUENCE
  Synthetic Construct
RSKDHAK

SEQ ID NO: 15462 - protein, 7 aa, ARTIFICIAL SEQUENCE
  Synthetic Construct
RSKDHDK

SEQ ID NO: 15463 - protein, 7 aa, ARTIFICIAL SEQUENCE
  Synthetic Construct
RSKDHEK

SEQ ID NO: 15464 - protein, 7 aa, ARTIFICIAL SEQUENCE
  Synthetic Construct
RSKDHFK

SEQ ID NO: 15465 - protein, 7 aa, ARTIFICIAL SEQUENCE
  Synthetic Construct
RSKDHGK

SEQ ID NO: 15466 - protein, 7 aa, ARTIFICIAL SEQUENCE
  Synthetic Construct
RSKDHHK

SEQ ID NO: 15467 - protein, 7 aa, ARTIFICIAL SEQUENCE
  Synthetic Construct
RSKDHIK

SEQ ID NO: 15468 - protein, 7 aa, ARTIFICIAL SEQUENCE
  Synthetic Construct
RSKDHLK

SEQ ID NO: 15469 - protein, 7 aa, ARTIFICIAL SEQUENCE
  Synthetic Construct
RSKDHNK

SEQ ID NO: 15470 - protein, 7 aa, ARTIFICIAL SEQUENCE
  Synthetic Construct
RSKDHQK

SEQ ID NO: 15471 - protein, 7 aa, ARTIFICIAL SEQUENCE
  Synthetic Construct
RSKDHRK

SEQ ID NO: 15472 - protein, 7 aa, ARTIFICIAL SEQUENCE
  Synthetic Construct
RSKDHSK

SEQ ID NO: 15473 - protein, 7 aa, ARTIFICIAL SEQUENCE
  Synthetic Construct
RSKDHTK

SEQ ID NO: 15474 - protein, 7 aa, ARTIFICIAL SEQUENCE
  Synthetic Construct
RSKDHYK

SEQ ID NO: 15475 - protein, 7 aa, ARTIFICIAL SEQUENCE
  Synthetic Construct
RSKDIAK

SEQ ID NO: 15476 - protein, 7 aa, ARTIFICIAL SEQUENCE
  Synthetic Construct
RSKDIDK

SEQ ID NO: 15477 - protein, 7 aa, ARTIFICIAL SEQUENCE
  Synthetic Construct
RSKDIEK

SEQ ID NO: 15478 - protein, 7 aa, ARTIFICIAL SEQUENCE
  Synthetic Construct
RSKDIFK

SEQ ID NO: 15479 - protein, 7 aa, ARTIFICIAL SEQUENCE
  Synthetic Construct
RSKDIGK

SEQ ID NO: 15480 - protein, 7 aa, ARTIFICIAL SEQUENCE
  Synthetic Construct
RSKDIHK

SEQ ID NO: 15481 - protein, 7 aa, ARTIFICIAL SEQUENCE
  Synthetic Construct
RSKDIIK

SEQ ID NO: 15482 - protein, 7 aa, ARTIFICIAL SEQUENCE
  Synthetic Construct
RSKDILK

SEQ ID NO: 15483 - protein, 7 aa, ARTIFICIAL SEQUENCE
  Synthetic Construct
RSKDINK

SEQ ID NO: 15484 - protein, 7 aa, ARTIFICIAL SEQUENCE
  Synthetic Construct
RSKDIQK

SEQ ID NO: 15485 - protein, 7 aa, ARTIFICIAL SEQUENCE
  Synthetic Construct
RSKDIRK

SEQ ID NO: 15486 - protein, 7 aa, ARTIFICIAL SEQUENCE
  Synthetic Construct
RSKDISK

SEQ ID NO: 15487 - protein, 7 aa, ARTIFICIAL SEQUENCE
  Synthetic Construct
RSKDITK

SEQ ID NO: 15488 - protein, 7 aa, ARTIFICIAL SEQUENCE
  Synthetic Construct
RSKDIYK

SEQ ID NO: 15489 - protein, 7 aa, ARTIFICIAL SEQUENCE
  Synthetic Construct
RSKDLAK

SEQ ID NO: 15490 - protein, 7 aa, ARTIFICIAL SEQUENCE
  Synthetic Construct
RSKDLDK

SEQ ID NO: 15491 - protein, 7 aa, ARTIFICIAL SEQUENCE
  Synthetic Construct
RSKDLEK

SEQ ID NO: 15492 - protein, 7 aa, ARTIFICIAL SEQUENCE
  Synthetic Construct
RSKDLFK

SEQ ID NO: 15493 - protein, 7 aa, ARTIFICIAL SEQUENCE
  Synthetic Construct
RSKDLGK

SEQ ID NO: 15494 - protein, 7 aa, ARTIFICIAL SEQUENCE
  Synthetic Construct
RSKDLHK

SEQ ID NO: 15495 - protein, 7 aa, ARTIFICIAL SEQUENCE
  Synthetic Construct
RSKDLIK

SEQ ID NO: 15496 - protein, 7 aa, ARTIFICIAL SEQUENCE
  Synthetic Construct
RSKDLLK

SEQ ID NO: 15497 - protein, 7 aa, ARTIFICIAL SEQUENCE
  Synthetic Construct
RSKDLNK

SEQ ID NO: 15498 - protein, 7 aa, ARTIFICIAL SEQUENCE
  Synthetic Construct
RSKDLQK

SEQ ID NO: 15499 - protein, 7 aa, ARTIFICIAL SEQUENCE
  Synthetic Construct
RSKDLRK

SEQ ID NO: 15500 - protein, 7 aa, ARTIFICIAL SEQUENCE
  Synthetic Construct
RSKDLSK

SEQ ID NO: 15501 - protein, 7 aa, ARTIFICIAL SEQUENCE
  Synthetic Construct
RSKDLTK

SEQ ID NO: 15502 - protein, 7 aa, ARTIFICIAL SEQUENCE
  Synthetic Construct
RSKDLYK

SEQ ID NO: 15503 - protein, 7 aa, ARTIFICIAL SEQUENCE
  Synthetic Construct
RSKDNAK

SEQ ID NO: 15504 - protein, 7 aa, ARTIFICIAL SEQUENCE
  Synthetic Construct
RSKDNDK

SEQ ID NO: 15505 - protein, 7 aa, ARTIFICIAL SEQUENCE
  Synthetic Construct
RSKDNEK

SEQ ID NO: 15506 - protein, 7 aa, ARTIFICIAL SEQUENCE
  Synthetic Construct
RSKDNFK

SEQ ID NO: 15507 - protein, 7 aa, ARTIFICIAL SEQUENCE
  Synthetic Construct
RSKDNGK

SEQ ID NO: 15508 - protein, 7 aa, ARTIFICIAL SEQUENCE
  Synthetic Construct
RSKDNHK

SEQ ID NO: 15509 - protein, 7 aa, ARTIFICIAL SEQUENCE
  Synthetic Construct
RSKDNIK

SEQ ID NO: 15510 - protein, 7 aa, ARTIFICIAL SEQUENCE
  Synthetic Construct
RSKDNLK

SEQ ID NO: 15511 - protein, 7 aa, ARTIFICIAL SEQUENCE
  Synthetic Construct
RSKDNNK

SEQ ID NO: 15512 - protein, 7 aa, ARTIFICIAL SEQUENCE
  Synthetic Construct
RSKDNQK

SEQ ID NO: 15513 - protein, 7 aa, ARTIFICIAL SEQUENCE
  Synthetic Construct
RSKDNRK

SEQ ID NO: 15514 - protein, 7 aa, ARTIFICIAL SEQUENCE
  Synthetic Construct
RSKDNSK

SEQ ID NO: 15515 - protein, 7 aa, ARTIFICIAL SEQUENCE
  Synthetic Construct
RSKDNTK

SEQ ID NO: 15516 - protein, 7 aa, ARTIFICIAL SEQUENCE
  Synthetic Construct
RSKDNYK

SEQ ID NO: 15517 - protein, 7 aa, ARTIFICIAL SEQUENCE
  Synthetic Construct
RSKDQAK

SEQ ID NO: 15518 - protein, 7 aa, ARTIFICIAL SEQUENCE
  Synthetic Construct
RSKDQDK

SEQ ID NO: 15519 - protein, 7 aa, ARTIFICIAL SEQUENCE
  Synthetic Construct
RSKDQEK

SEQ ID NO: 15520 - protein, 7 aa, ARTIFICIAL SEQUENCE
  Synthetic Construct
RSKDQFK

SEQ ID NO: 15521 - protein, 7 aa, ARTIFICIAL SEQUENCE
  Synthetic Construct
RSKDQGK

SEQ ID NO: 15522 - protein, 7 aa, ARTIFICIAL SEQUENCE
  Synthetic Construct
RSKDQHK

SEQ ID NO: 15523 - protein, 7 aa, ARTIFICIAL SEQUENCE
  Synthetic Construct
RSKDQIK

SEQ ID NO: 15524 - protein, 7 aa, ARTIFICIAL SEQUENCE
  Synthetic Construct
RSKDQLK

SEQ ID NO: 15525 - protein, 7 aa, ARTIFICIAL SEQUENCE
  Synthetic Construct
RSKDQNK

SEQ ID NO: 15526 - protein, 7 aa, ARTIFICIAL SEQUENCE
  Synthetic Construct
RSKDQQK

SEQ ID NO: 15527 - protein, 7 aa, ARTIFICIAL SEQUENCE
  Synthetic Construct
RSKDQRK

SEQ ID NO: 15528 - protein, 7 aa, ARTIFICIAL SEQUENCE
  Synthetic Construct
RSKDQSK

SEQ ID NO: 15529 - protein, 7 aa, ARTIFICIAL SEQUENCE
  Synthetic Construct
RSKDQTK

SEQ ID NO: 15530 - protein, 7 aa, ARTIFICIAL SEQUENCE
  Synthetic Construct
RSKDQYK

SEQ ID NO: 15531 - protein, 7 aa, ARTIFICIAL SEQUENCE
  Synthetic Construct
RSKDRAK

SEQ ID NO: 15532 - protein, 7 aa, ARTIFICIAL SEQUENCE
  Synthetic Construct
RSKDRDK

SEQ ID NO: 15533 - protein, 7 aa, ARTIFICIAL SEQUENCE
  Synthetic Construct
RSKDREK

SEQ ID NO: 15534 - protein, 7 aa, ARTIFICIAL SEQUENCE
  Synthetic Construct
RSKDRFK

SEQ ID NO: 15535 - protein, 7 aa, ARTIFICIAL SEQUENCE
  Synthetic Construct
RSKDRGK

SEQ ID NO: 15536 - protein, 7 aa, ARTIFICIAL SEQUENCE
  Synthetic Construct
RSKDRHK

SEQ ID NO: 15537 - protein, 7 aa, ARTIFICIAL SEQUENCE
  Synthetic Construct
RSKDRIK

SEQ ID NO: 15538 - protein, 7 aa, ARTIFICIAL SEQUENCE
  Synthetic Construct
RSKDRLK

SEQ ID NO: 15539 - protein, 7 aa, ARTIFICIAL SEQUENCE
  Synthetic Construct
RSKDRNK

SEQ ID NO: 15540 - protein, 7 aa, ARTIFICIAL SEQUENCE
  Synthetic Construct
RSKDRQK

SEQ ID NO: 15541 - protein, 7 aa, ARTIFICIAL SEQUENCE
  Synthetic Construct
RSKDRRK

SEQ ID NO: 15542 - protein, 7 aa, ARTIFICIAL SEQUENCE
  Synthetic Construct
RSKDRSK

SEQ ID NO: 15543 - protein, 7 aa, ARTIFICIAL SEQUENCE
  Synthetic Construct
RSKDRTK

SEQ ID NO: 15544 - protein, 7 aa, ARTIFICIAL SEQUENCE
  Synthetic Construct
RSKDRYK

SEQ ID NO: 15545 - protein, 7 aa, ARTIFICIAL SEQUENCE
  Synthetic Construct
RSKDSAK

SEQ ID NO: 15546 - protein, 7 aa, ARTIFICIAL SEQUENCE
  Synthetic Construct
RSKDSDK

SEQ ID NO: 15547 - protein, 7 aa, ARTIFICIAL SEQUENCE
  Synthetic Construct
RSKDSEK

SEQ ID NO: 15548 - protein, 7 aa, ARTIFICIAL SEQUENCE
  Synthetic Construct
RSKDSFK

SEQ ID NO: 15549 - protein, 7 aa, ARTIFICIAL SEQUENCE
  Synthetic Construct
RSKDSGK

SEQ ID NO: 15550 - protein, 7 aa, ARTIFICIAL SEQUENCE
  Synthetic Construct
RSKDSHK

SEQ ID NO: 15551 - protein, 7 aa, ARTIFICIAL SEQUENCE
  Synthetic Construct
RSKDSIK

SEQ ID NO: 15552 - protein, 7 aa, ARTIFICIAL SEQUENCE
  Synthetic Construct
RSKDSLK

SEQ ID NO: 15553 - protein, 7 aa, ARTIFICIAL SEQUENCE
  Synthetic Construct
RSKDSNK

SEQ ID NO: 15554 - protein, 7 aa, ARTIFICIAL SEQUENCE
  Synthetic Construct
RSKDSQK

SEQ ID NO: 15555 - protein, 7 aa, ARTIFICIAL SEQUENCE
  Synthetic Construct
RSKDSRK

SEQ ID NO: 15556 - protein, 7 aa, ARTIFICIAL SEQUENCE
  Synthetic Construct
RSKDSSK

SEQ ID NO: 15557 - protein, 7 aa, ARTIFICIAL SEQUENCE
  Synthetic Construct
RSKDSTK

SEQ ID NO: 15558 - protein, 7 aa, ARTIFICIAL SEQUENCE
  Synthetic Construct
RSKDSYK

SEQ ID NO: 15559 - protein, 7 aa, ARTIFICIAL SEQUENCE
  Synthetic Construct
RSKDTAK

SEQ ID NO: 15560 - protein, 7 aa, ARTIFICIAL SEQUENCE
  Synthetic Construct
RSKDTDK

SEQ ID NO: 15561 - protein, 7 aa, ARTIFICIAL SEQUENCE
  Synthetic Construct
RSKDTEK

SEQ ID NO: 15562 - protein, 7 aa, ARTIFICIAL SEQUENCE
  Synthetic Construct
RSKDTFK

SEQ ID NO: 15563 - protein, 7 aa, ARTIFICIAL SEQUENCE
  Synthetic Construct
RSKDTGK

SEQ ID NO: 15564 - protein, 7 aa, ARTIFICIAL SEQUENCE
  Synthetic Construct
RSKDTHK

SEQ ID NO: 15565 - protein, 7 aa, ARTIFICIAL SEQUENCE
  Synthetic Construct
RSKDTIK

SEQ ID NO: 15566 - protein, 7 aa, ARTIFICIAL SEQUENCE
  Synthetic Construct
RSKDTLK

SEQ ID NO: 15567 - protein, 7 aa, ARTIFICIAL SEQUENCE
  Synthetic Construct
RSKDTNK

SEQ ID NO: 15568 - protein, 7 aa, ARTIFICIAL SEQUENCE
  Synthetic Construct
RSKDTQK

SEQ ID NO: 15569 - protein, 7 aa, ARTIFICIAL SEQUENCE
  Synthetic Construct
RSKDTRK

SEQ ID NO: 15570 - protein, 7 aa, ARTIFICIAL SEQUENCE
  Synthetic Construct
RSKDTSK

SEQ ID NO: 15571 - protein, 7 aa, ARTIFICIAL SEQUENCE
  Synthetic Construct
RSKDTTK

SEQ ID NO: 15572 - protein, 7 aa, ARTIFICIAL SEQUENCE
  Synthetic Construct
RSKDTYK

SEQ ID NO: 15573 - protein, 7 aa, ARTIFICIAL SEQUENCE
  Synthetic Construct
RSKDYAK

SEQ ID NO: 15574 - protein, 7 aa, ARTIFICIAL SEQUENCE
  Synthetic Construct
RSKDYDK

SEQ ID NO: 15575 - protein, 7 aa, ARTIFICIAL SEQUENCE
  Synthetic Construct
RSKDYEK

SEQ ID NO: 15576 - protein, 7 aa, ARTIFICIAL SEQUENCE
  Synthetic Construct
RSKDYFK

SEQ ID NO: 15577 - protein, 7 aa, ARTIFICIAL SEQUENCE
  Synthetic Construct
RSKDYGK

SEQ ID NO: 15578 - protein, 7 aa, ARTIFICIAL SEQUENCE
  Synthetic Construct
RSKDYHK

SEQ ID NO: 15579 - protein, 7 aa, ARTIFICIAL SEQUENCE
  Synthetic Construct
RSKDYIK

SEQ ID NO: 15580 - protein, 7 aa, ARTIFICIAL SEQUENCE
  Synthetic Construct
RSKDYLK

SEQ ID NO: 15581 - protein, 7 aa, ARTIFICIAL SEQUENCE
  Synthetic Construct
RSKDYNK

SEQ ID NO: 15582 - protein, 7 aa, ARTIFICIAL SEQUENCE
  Synthetic Construct
RSKDYQK

SEQ ID NO: 15583 - protein, 7 aa, ARTIFICIAL SEQUENCE
  Synthetic Construct
RSKDYRK

SEQ ID NO: 15584 - protein, 7 aa, ARTIFICIAL SEQUENCE
  Synthetic Construct
RSKDYSK

SEQ ID NO: 15585 - protein, 7 aa, ARTIFICIAL SEQUENCE
  Synthetic Construct
RSKDYTK

SEQ ID NO: 15586 - protein, 7 aa, ARTIFICIAL SEQUENCE
  Synthetic Construct
RSKDYYK

SEQ ID NO: 15587 - protein, 7 aa, ARTIFICIAL SEQUENCE
  Synthetic Construct
RSKEAAK

SEQ ID NO: 15588 - protein, 7 aa, ARTIFICIAL SEQUENCE
  Synthetic Construct
RSKEADK

SEQ ID NO: 15589 - protein, 7 aa, ARTIFICIAL SEQUENCE
  Synthetic Construct
RSKEAEK

SEQ ID NO: 15590 - protein, 7 aa, ARTIFICIAL SEQUENCE
  Synthetic Construct
RSKEAFK

SEQ ID NO: 15591 - protein, 7 aa, ARTIFICIAL SEQUENCE
  Synthetic Construct
RSKEAGK

SEQ ID NO: 15592 - protein, 7 aa, ARTIFICIAL SEQUENCE
  Synthetic Construct
RSKEAHK

SEQ ID NO: 15593 - protein, 7 aa, ARTIFICIAL SEQUENCE
  Synthetic Construct
RSKEAIK

SEQ ID NO: 15594 - protein, 7 aa, ARTIFICIAL SEQUENCE
  Synthetic Construct
RSKEALK

SEQ ID NO: 15595 - protein, 7 aa, ARTIFICIAL SEQUENCE
  Synthetic Construct
RSKEANK

SEQ ID NO: 15596 - protein, 7 aa, ARTIFICIAL SEQUENCE
  Synthetic Construct
RSKEAQK

SEQ ID NO: 15597 - protein, 7 aa, ARTIFICIAL SEQUENCE
  Synthetic Construct
RSKEARK

SEQ ID NO: 15598 - protein, 7 aa, ARTIFICIAL SEQUENCE
  Synthetic Construct
RSKEASK

SEQ ID NO: 15599 - protein, 7 aa, ARTIFICIAL SEQUENCE
  Synthetic Construct
RSKEATK

SEQ ID NO: 15600 - protein, 7 aa, ARTIFICIAL SEQUENCE
  Synthetic Construct
RSKEAYK

SEQ ID NO: 15601 - protein, 7 aa, ARTIFICIAL SEQUENCE
  Synthetic Construct
RSKEDAK

SEQ ID NO: 15602 - protein, 7 aa, ARTIFICIAL SEQUENCE
  Synthetic Construct
RSKEDDK

SEQ ID NO: 15603 - protein, 7 aa, ARTIFICIAL SEQUENCE
  Synthetic Construct
RSKEDEK

SEQ ID NO: 15604 - protein, 7 aa, ARTIFICIAL SEQUENCE
  Synthetic Construct
RSKEDFK

SEQ ID NO: 15605 - protein, 7 aa, ARTIFICIAL SEQUENCE
  Synthetic Construct
RSKEDGK

SEQ ID NO: 15606 - protein, 7 aa, ARTIFICIAL SEQUENCE
  Synthetic Construct
RSKEDHK

SEQ ID NO: 15607 - protein, 7 aa, ARTIFICIAL SEQUENCE
  Synthetic Construct
RSKEDIK

SEQ ID NO: 15608 - protein, 7 aa, ARTIFICIAL SEQUENCE
  Synthetic Construct
RSKEDLK

SEQ ID NO: 15609 - protein, 7 aa, ARTIFICIAL SEQUENCE
  Synthetic Construct
RSKEDNK

SEQ ID NO: 15610 - protein, 7 aa, ARTIFICIAL SEQUENCE
  Synthetic Construct
RSKEDQK

SEQ ID NO: 15611 - protein, 7 aa, ARTIFICIAL SEQUENCE
  Synthetic Construct
RSKEDRK

SEQ ID NO: 15612 - protein, 7 aa, ARTIFICIAL SEQUENCE
  Synthetic Construct
RSKEDSK

SEQ ID NO: 15613 - protein, 7 aa, ARTIFICIAL SEQUENCE
  Synthetic Construct
RSKEDTK

SEQ ID NO: 15614 - protein, 7 aa, ARTIFICIAL SEQUENCE
  Synthetic Construct
RSKEDYK

SEQ ID NO: 15615 - protein, 7 aa, ARTIFICIAL SEQUENCE
  Synthetic Construct
RSKEEAK

SEQ ID NO: 15616 - protein, 7 aa, ARTIFICIAL SEQUENCE
  Synthetic Construct
RSKEEDK

SEQ ID NO: 15617 - protein, 7 aa, ARTIFICIAL SEQUENCE
  Synthetic Construct
RSKEEEK

SEQ ID NO: 15618 - protein, 7 aa, ARTIFICIAL SEQUENCE
  Synthetic Construct
RSKEEFK

SEQ ID NO: 15619 - protein, 7 aa, ARTIFICIAL SEQUENCE
  Synthetic Construct
RSKEEGK

SEQ ID NO: 15620 - protein, 7 aa, ARTIFICIAL SEQUENCE
  Synthetic Construct
RSKEEHK

SEQ ID NO: 15621 - protein, 7 aa, ARTIFICIAL SEQUENCE
  Synthetic Construct
RSKEEIK

SEQ ID NO: 15622 - protein, 7 aa, ARTIFICIAL SEQUENCE
  Synthetic Construct
RSKEELK

SEQ ID NO: 15623 - protein, 7 aa, ARTIFICIAL SEQUENCE
  Synthetic Construct
RSKEENK

SEQ ID NO: 15624 - protein, 7 aa, ARTIFICIAL SEQUENCE
  Synthetic Construct
RSKEEQK

SEQ ID NO: 15625 - protein, 7 aa, ARTIFICIAL SEQUENCE
  Synthetic Construct
RSKEERK

SEQ ID NO: 15626 - protein, 7 aa, ARTIFICIAL SEQUENCE
  Synthetic Construct
RSKEESK

SEQ ID NO: 15627 - protein, 7 aa, ARTIFICIAL SEQUENCE
  Synthetic Construct
RSKEETK

SEQ ID NO: 15628 - protein, 7 aa, ARTIFICIAL SEQUENCE
  Synthetic Construct
RSKEEYK

SEQ ID NO: 15629 - protein, 7 aa, ARTIFICIAL SEQUENCE
  Synthetic Construct
RSKEFAK

SEQ ID NO: 15630 - protein, 7 aa, ARTIFICIAL SEQUENCE
  Synthetic Construct
RSKEFDK

SEQ ID NO: 15631 - protein, 7 aa, ARTIFICIAL SEQUENCE
  Synthetic Construct
RSKEFEK

SEQ ID NO: 15632 - protein, 7 aa, ARTIFICIAL SEQUENCE
  Synthetic Construct
RSKEFFK

SEQ ID NO: 15633 - protein, 7 aa, ARTIFICIAL SEQUENCE
  Synthetic Construct
RSKEFGK

SEQ ID NO: 15634 - protein, 7 aa, ARTIFICIAL SEQUENCE
  Synthetic Construct
RSKEFHK

SEQ ID NO: 15635 - protein, 7 aa, ARTIFICIAL SEQUENCE
  Synthetic Construct
RSKEFIK

SEQ ID NO: 15636 - protein, 7 aa, ARTIFICIAL SEQUENCE
  Synthetic Construct
RSKEFLK

SEQ ID NO: 15637 - protein, 7 aa, ARTIFICIAL SEQUENCE
  Synthetic Construct
RSKEFNK

SEQ ID NO: 15638 - protein, 7 aa, ARTIFICIAL SEQUENCE
  Synthetic Construct
RSKEFQK

SEQ ID NO: 15639 - protein, 7 aa, ARTIFICIAL SEQUENCE
  Synthetic Construct
RSKEFRK

SEQ ID NO: 15640 - protein, 7 aa, ARTIFICIAL SEQUENCE
  Synthetic Construct
RSKEFSK

SEQ ID NO: 15641 - protein, 7 aa, ARTIFICIAL SEQUENCE
  Synthetic Construct
RSKEFTK

SEQ ID NO: 15642 - protein, 7 aa, ARTIFICIAL SEQUENCE
  Synthetic Construct
RSKEFYK

SEQ ID NO: 15643 - protein, 7 aa, ARTIFICIAL SEQUENCE
  Synthetic Construct
RSKEGAK

SEQ ID NO: 15644 - protein, 7 aa, ARTIFICIAL SEQUENCE
  Synthetic Construct
RSKEGDK

SEQ ID NO: 15645 - protein, 7 aa, ARTIFICIAL SEQUENCE
  Synthetic Construct
RSKEGEK

SEQ ID NO: 15646 - protein, 7 aa, ARTIFICIAL SEQUENCE
  Synthetic Construct
RSKEGFK

SEQ ID NO: 15647 - protein, 7 aa, ARTIFICIAL SEQUENCE
  Synthetic Construct
RSKEGGK

SEQ ID NO: 15648 - protein, 7 aa, ARTIFICIAL SEQUENCE
  Synthetic Construct
RSKEGHK

SEQ ID NO: 15649 - protein, 7 aa, ARTIFICIAL SEQUENCE
  Synthetic Construct
RSKEGIK

SEQ ID NO: 15650 - protein, 7 aa, ARTIFICIAL SEQUENCE
  Synthetic Construct
RSKEGLK

SEQ ID NO: 15651 - protein, 7 aa, ARTIFICIAL SEQUENCE
  Synthetic Construct
RSKEGNK

SEQ ID NO: 15652 - protein, 7 aa, ARTIFICIAL SEQUENCE
  Synthetic Construct
RSKEGQK

SEQ ID NO: 15653 - protein, 7 aa, ARTIFICIAL SEQUENCE
  Synthetic Construct
RSKEGRK

SEQ ID NO: 15654 - protein, 7 aa, ARTIFICIAL SEQUENCE
  Synthetic Construct
RSKEGSK

SEQ ID NO: 15655 - protein, 7 aa, ARTIFICIAL SEQUENCE
  Synthetic Construct
RSKEGTK

SEQ ID NO: 15656 - protein, 7 aa, ARTIFICIAL SEQUENCE
  Synthetic Construct
RSKEGYK

SEQ ID NO: 15657 - protein, 7 aa, ARTIFICIAL SEQUENCE
  Synthetic Construct
RSKEHAK

SEQ ID NO: 15658 - protein, 7 aa, ARTIFICIAL SEQUENCE
  Synthetic Construct
RSKEHDK

SEQ ID NO: 15659 - protein, 7 aa, ARTIFICIAL SEQUENCE
  Synthetic Construct
RSKEHEK

SEQ ID NO: 15660 - protein, 7 aa, ARTIFICIAL SEQUENCE
  Synthetic Construct
RSKEHFK

SEQ ID NO: 15661 - protein, 7 aa, ARTIFICIAL SEQUENCE
  Synthetic Construct
RSKEHGK

SEQ ID NO: 15662 - protein, 7 aa, ARTIFICIAL SEQUENCE
  Synthetic Construct
RSKEHHK

SEQ ID NO: 15663 - protein, 7 aa, ARTIFICIAL SEQUENCE
  Synthetic Construct
RSKEHIK

SEQ ID NO: 15664 - protein, 7 aa, ARTIFICIAL SEQUENCE
  Synthetic Construct
RSKEHLK

SEQ ID NO: 15665 - protein, 7 aa, ARTIFICIAL SEQUENCE
  Synthetic Construct
RSKEHNK

SEQ ID NO: 15666 - protein, 7 aa, ARTIFICIAL SEQUENCE
  Synthetic Construct
RSKEHQK

SEQ ID NO: 15667 - protein, 7 aa, ARTIFICIAL SEQUENCE
  Synthetic Construct
RSKEHRK

SEQ ID NO: 15668 - protein, 7 aa, ARTIFICIAL SEQUENCE
  Synthetic Construct
RSKEHSK

SEQ ID NO: 15669 - protein, 7 aa, ARTIFICIAL SEQUENCE
  Synthetic Construct
RSKEHTK

SEQ ID NO: 15670 - protein, 7 aa, ARTIFICIAL SEQUENCE
  Synthetic Construct
RSKEHYK

SEQ ID NO: 15671 - protein, 7 aa, ARTIFICIAL SEQUENCE
  Synthetic Construct
RSKEIAK

SEQ ID NO: 15672 - protein, 7 aa, ARTIFICIAL SEQUENCE
  Synthetic Construct
RSKEIDK

SEQ ID NO: 15673 - protein, 7 aa, ARTIFICIAL SEQUENCE
  Synthetic Construct
RSKEIEK

SEQ ID NO: 15674 - protein, 7 aa, ARTIFICIAL SEQUENCE
  Synthetic Construct
RSKEIFK

SEQ ID NO: 15675 - protein, 7 aa, ARTIFICIAL SEQUENCE
  Synthetic Construct
RSKEIGK

SEQ ID NO: 15676 - protein, 7 aa, ARTIFICIAL SEQUENCE
  Synthetic Construct
RSKEIHK

SEQ ID NO: 15677 - protein, 7 aa, ARTIFICIAL SEQUENCE
  Synthetic Construct
RSKEIIK

SEQ ID NO: 15678 - protein, 7 aa, ARTIFICIAL SEQUENCE
  Synthetic Construct
RSKEILK

SEQ ID NO: 15679 - protein, 7 aa, ARTIFICIAL SEQUENCE
  Synthetic Construct
RSKEINK

SEQ ID NO: 15680 - protein, 7 aa, ARTIFICIAL SEQUENCE
  Synthetic Construct
RSKEIQK

SEQ ID NO: 15681 - protein, 7 aa, ARTIFICIAL SEQUENCE
  Synthetic Construct
RSKEIRK

SEQ ID NO: 15682 - protein, 7 aa, ARTIFICIAL SEQUENCE
  Synthetic Construct
RSKEISK

SEQ ID NO: 15683 - protein, 7 aa, ARTIFICIAL SEQUENCE
  Synthetic Construct
RSKEITK

SEQ ID NO: 15684 - protein, 7 aa, ARTIFICIAL SEQUENCE
  Synthetic Construct
RSKEIYK

SEQ ID NO: 15685 - protein, 7 aa, ARTIFICIAL SEQUENCE
  Synthetic Construct
RSKELAK

SEQ ID NO: 15686 - protein, 7 aa, ARTIFICIAL SEQUENCE
  Synthetic Construct
RSKELDK

SEQ ID NO: 15687 - protein, 7 aa, ARTIFICIAL SEQUENCE
  Synthetic Construct
RSKELEK

SEQ ID NO: 15688 - protein, 7 aa, ARTIFICIAL SEQUENCE
  Synthetic Construct
RSKELFK

SEQ ID NO: 15689 - protein, 7 aa, ARTIFICIAL SEQUENCE
  Synthetic Construct
RSKELGK

SEQ ID NO: 15690 - protein, 7 aa, ARTIFICIAL SEQUENCE
  Synthetic Construct
RSKELHK

SEQ ID NO: 15691 - protein, 7 aa, ARTIFICIAL SEQUENCE
  Synthetic Construct
RSKELIK

SEQ ID NO: 15692 - protein, 7 aa, ARTIFICIAL SEQUENCE
  Synthetic Construct
RSKELLK

SEQ ID NO: 15693 - protein, 7 aa, ARTIFICIAL SEQUENCE
  Synthetic Construct
RSKELNK

SEQ ID NO: 15694 - protein, 7 aa, ARTIFICIAL SEQUENCE
  Synthetic Construct
RSKELQK

SEQ ID NO: 15695 - protein, 7 aa, ARTIFICIAL SEQUENCE
  Synthetic Construct
RSKELRK

SEQ ID NO: 15696 - protein, 7 aa, ARTIFICIAL SEQUENCE
  Synthetic Construct
RSKELSK

SEQ ID NO: 15697 - protein, 7 aa, ARTIFICIAL SEQUENCE
  Synthetic Construct
RSKELTK

SEQ ID NO: 15698 - protein, 7 aa, ARTIFICIAL SEQUENCE
  Synthetic Construct
RSKELYK

SEQ ID NO: 15699 - protein, 7 aa, ARTIFICIAL SEQUENCE
  Synthetic Construct
RSKENAK

SEQ ID NO: 15700 - protein, 7 aa, ARTIFICIAL SEQUENCE
  Synthetic Construct
RSKENDK

SEQ ID NO: 15701 - protein, 7 aa, ARTIFICIAL SEQUENCE
  Synthetic Construct
RSKENEK

SEQ ID NO: 15702 - protein, 7 aa, ARTIFICIAL SEQUENCE
  Synthetic Construct
RSKENFK

SEQ ID NO: 15703 - protein, 7 aa, ARTIFICIAL SEQUENCE
  Synthetic Construct
RSKENGK

SEQ ID NO: 15704 - protein, 7 aa, ARTIFICIAL SEQUENCE
  Synthetic Construct
RSKENHK

SEQ ID NO: 15705 - protein, 7 aa, ARTIFICIAL SEQUENCE
  Synthetic Construct
RSKENIK

SEQ ID NO: 15706 - protein, 7 aa, ARTIFICIAL SEQUENCE
  Synthetic Construct
RSKENLK

SEQ ID NO: 15707 - protein, 7 aa, ARTIFICIAL SEQUENCE
  Synthetic Construct
RSKENNK

SEQ ID NO: 15708 - protein, 7 aa, ARTIFICIAL SEQUENCE
  Synthetic Construct
RSKENQK

SEQ ID NO: 15709 - protein, 7 aa, ARTIFICIAL SEQUENCE
  Synthetic Construct
RSKENRK

SEQ ID NO: 15710 - protein, 7 aa, ARTIFICIAL SEQUENCE
  Synthetic Construct
RSKENSK

SEQ ID NO: 15711 - protein, 7 aa, ARTIFICIAL SEQUENCE
  Synthetic Construct
RSKENTK

SEQ ID NO: 15712 - protein, 7 aa, ARTIFICIAL SEQUENCE
  Synthetic Construct
RSKENYK

SEQ ID NO: 15713 - protein, 7 aa, ARTIFICIAL SEQUENCE
  Synthetic Construct
RSKEQAK

SEQ ID NO: 15714 - protein, 7 aa, ARTIFICIAL SEQUENCE
  Synthetic Construct
RSKEQDK

SEQ ID NO: 15715 - protein, 7 aa, ARTIFICIAL SEQUENCE
  Synthetic Construct
RSKEQEK

SEQ ID NO: 15716 - protein, 7 aa, ARTIFICIAL SEQUENCE
  Synthetic Construct
RSKEQFK

SEQ ID NO: 15717 - protein, 7 aa, ARTIFICIAL SEQUENCE
  Synthetic Construct
RSKEQGK

SEQ ID NO: 15718 - protein, 7 aa, ARTIFICIAL SEQUENCE
  Synthetic Construct
RSKEQHK

SEQ ID NO: 15719 - protein, 7 aa, ARTIFICIAL SEQUENCE
  Synthetic Construct
RSKEQIK

SEQ ID NO: 15720 - protein, 7 aa, ARTIFICIAL SEQUENCE
  Synthetic Construct
RSKEQLK

SEQ ID NO: 15721 - protein, 7 aa, ARTIFICIAL SEQUENCE
  Synthetic Construct
RSKEQNK

SEQ ID NO: 15722 - protein, 7 aa, ARTIFICIAL SEQUENCE
  Synthetic Construct
RSKEQQK

SEQ ID NO: 15723 - protein, 7 aa, ARTIFICIAL SEQUENCE
  Synthetic Construct
RSKEQRK

SEQ ID NO: 15724 - protein, 7 aa, ARTIFICIAL SEQUENCE
  Synthetic Construct
RSKEQSK

SEQ ID NO: 15725 - protein, 7 aa, ARTIFICIAL SEQUENCE
  Synthetic Construct
RSKEQTK

SEQ ID NO: 15726 - protein, 7 aa, ARTIFICIAL SEQUENCE
  Synthetic Construct
RSKEQYK

SEQ ID NO: 15727 - protein, 7 aa, ARTIFICIAL SEQUENCE
  Synthetic Construct
RSKERAK

SEQ ID NO: 15728 - protein, 7 aa, ARTIFICIAL SEQUENCE
  Synthetic Construct
RSKERDK

SEQ ID NO: 15729 - protein, 7 aa, ARTIFICIAL SEQUENCE
  Synthetic Construct
RSKEREK

SEQ ID NO: 15730 - protein, 7 aa, ARTIFICIAL SEQUENCE
  Synthetic Construct
RSKERFK

SEQ ID NO: 15731 - protein, 7 aa, ARTIFICIAL SEQUENCE
  Synthetic Construct
RSKERGK

SEQ ID NO: 15732 - protein, 7 aa, ARTIFICIAL SEQUENCE
  Synthetic Construct
RSKERHK

SEQ ID NO: 15733 - protein, 7 aa, ARTIFICIAL SEQUENCE
  Synthetic Construct
RSKERIK

SEQ ID NO: 15734 - protein, 7 aa, ARTIFICIAL SEQUENCE
  Synthetic Construct
RSKERLK

SEQ ID NO: 15735 - protein, 7 aa, ARTIFICIAL SEQUENCE
  Synthetic Construct
RSKERNK

SEQ ID NO: 15736 - protein, 7 aa, ARTIFICIAL SEQUENCE
  Synthetic Construct
RSKERQK

SEQ ID NO: 15737 - protein, 7 aa, ARTIFICIAL SEQUENCE
  Synthetic Construct
RSKERRK

SEQ ID NO: 15738 - protein, 7 aa, ARTIFICIAL SEQUENCE
  Synthetic Construct
RSKERSK

SEQ ID NO: 15739 - protein, 7 aa, ARTIFICIAL SEQUENCE
  Synthetic Construct
RSKERTK

SEQ ID NO: 15740 - protein, 7 aa, ARTIFICIAL SEQUENCE
  Synthetic Construct
RSKERYK

SEQ ID NO: 15741 - protein, 7 aa, ARTIFICIAL SEQUENCE
  Synthetic Construct
RSKESAK

SEQ ID NO: 15742 - protein, 7 aa, ARTIFICIAL SEQUENCE
  Synthetic Construct
RSKESDK

SEQ ID NO: 15743 - protein, 7 aa, ARTIFICIAL SEQUENCE
  Synthetic Construct
RSKESEK

SEQ ID NO: 15744 - protein, 7 aa, ARTIFICIAL SEQUENCE
  Synthetic Construct
RSKESFK

SEQ ID NO: 15745 - protein, 7 aa, ARTIFICIAL SEQUENCE
  Synthetic Construct
RSKESGK

SEQ ID NO: 15746 - protein, 7 aa, ARTIFICIAL SEQUENCE
  Synthetic Construct
RSKESHK

SEQ ID NO: 15747 - protein, 7 aa, ARTIFICIAL SEQUENCE
  Synthetic Construct
RSKESIK

SEQ ID NO: 15748 - protein, 7 aa, ARTIFICIAL SEQUENCE
  Synthetic Construct
RSKESLK

SEQ ID NO: 15749 - protein, 7 aa, ARTIFICIAL SEQUENCE
  Synthetic Construct
RSKESNK

SEQ ID NO: 15750 - protein, 7 aa, ARTIFICIAL SEQUENCE
  Synthetic Construct
RSKESQK

SEQ ID NO: 15751 - protein, 7 aa, ARTIFICIAL SEQUENCE
  Synthetic Construct
RSKESRK

SEQ ID NO: 15752 - protein, 7 aa, ARTIFICIAL SEQUENCE
  Synthetic Construct
RSKESSK

SEQ ID NO: 15753 - protein, 7 aa, ARTIFICIAL SEQUENCE
  Synthetic Construct
RSKESTK

SEQ ID NO: 15754 - protein, 7 aa, ARTIFICIAL SEQUENCE
  Synthetic Construct
RSKESYK

SEQ ID NO: 15755 - protein, 7 aa, ARTIFICIAL SEQUENCE
  Synthetic Construct
RSKETAK

SEQ ID NO: 15756 - protein, 7 aa, ARTIFICIAL SEQUENCE
  Synthetic Construct
RSKETDK

SEQ ID NO: 15757 - protein, 7 aa, ARTIFICIAL SEQUENCE
  Synthetic Construct
RSKETEK

SEQ ID NO: 15758 - protein, 7 aa, ARTIFICIAL SEQUENCE
  Synthetic Construct
RSKETFK

SEQ ID NO: 15759 - protein, 7 aa, ARTIFICIAL SEQUENCE
  Synthetic Construct
RSKETGK

SEQ ID NO: 15760 - protein, 7 aa, ARTIFICIAL SEQUENCE
  Synthetic Construct
RSKETHK

SEQ ID NO: 15761 - protein, 7 aa, ARTIFICIAL SEQUENCE
  Synthetic Construct
RSKETIK

SEQ ID NO: 15762 - protein, 7 aa, ARTIFICIAL SEQUENCE
  Synthetic Construct
RSKETLK

SEQ ID NO: 15763 - protein, 7 aa, ARTIFICIAL SEQUENCE
  Synthetic Construct
RSKETNK

SEQ ID NO: 15764 - protein, 7 aa, ARTIFICIAL SEQUENCE
  Synthetic Construct
RSKETQK

SEQ ID NO: 15765 - protein, 7 aa, ARTIFICIAL SEQUENCE
  Synthetic Construct
RSKETRK

SEQ ID NO: 15766 - protein, 7 aa, ARTIFICIAL SEQUENCE
  Synthetic Construct
RSKETSK

SEQ ID NO: 15767 - protein, 7 aa, ARTIFICIAL SEQUENCE
  Synthetic Construct
RSKETTK

SEQ ID NO: 15768 - protein, 7 aa, ARTIFICIAL SEQUENCE
  Synthetic Construct
RSKETYK

SEQ ID NO: 15769 - protein, 7 aa, ARTIFICIAL SEQUENCE
  Synthetic Construct
RSKEYAK

SEQ ID NO: 15770 - protein, 7 aa, ARTIFICIAL SEQUENCE
  Synthetic Construct
RSKEYDK

SEQ ID NO: 15771 - protein, 7 aa, ARTIFICIAL SEQUENCE
  Synthetic Construct
RSKEYEK

SEQ ID NO: 15772 - protein, 7 aa, ARTIFICIAL SEQUENCE
  Synthetic Construct
RSKEYFK

SEQ ID NO: 15773 - protein, 7 aa, ARTIFICIAL SEQUENCE
  Synthetic Construct
RSKEYGK

SEQ ID NO: 15774 - protein, 7 aa, ARTIFICIAL SEQUENCE
  Synthetic Construct
RSKEYHK

SEQ ID NO: 15775 - protein, 7 aa, ARTIFICIAL SEQUENCE
  Synthetic Construct
RSKEYIK

SEQ ID NO: 15776 - protein, 7 aa, ARTIFICIAL SEQUENCE
  Synthetic Construct
RSKEYLK

SEQ ID NO: 15777 - protein, 7 aa, ARTIFICIAL SEQUENCE
  Synthetic Construct
RSKEYNK

SEQ ID NO: 15778 - protein, 7 aa, ARTIFICIAL SEQUENCE
  Synthetic Construct
RSKEYQK

SEQ ID NO: 15779 - protein, 7 aa, ARTIFICIAL SEQUENCE
  Synthetic Construct
RSKEYRK

SEQ ID NO: 15780 - protein, 7 aa, ARTIFICIAL SEQUENCE
  Synthetic Construct
RSKEYSK

SEQ ID NO: 15781 - protein, 7 aa, ARTIFICIAL SEQUENCE
  Synthetic Construct
RSKEYTK

SEQ ID NO: 15782 - protein, 7 aa, ARTIFICIAL SEQUENCE
  Synthetic Construct
RSKEYYK

SEQ ID NO: 15783 - protein, 7 aa, ARTIFICIAL SEQUENCE
  Synthetic Construct
RSKFAAK

SEQ ID NO: 15784 - protein, 7 aa, ARTIFICIAL SEQUENCE
  Synthetic Construct
RSKFADK

SEQ ID NO: 15785 - protein, 7 aa, ARTIFICIAL SEQUENCE
  Synthetic Construct
RSKFAEK

SEQ ID NO: 15786 - protein, 7 aa, ARTIFICIAL SEQUENCE
  Synthetic Construct
RSKFAFK

SEQ ID NO: 15787 - protein, 7 aa, ARTIFICIAL SEQUENCE
  Synthetic Construct
RSKFAGK

SEQ ID NO: 15788 - protein, 7 aa, ARTIFICIAL SEQUENCE
  Synthetic Construct
RSKFAHK

SEQ ID NO: 15789 - protein, 7 aa, ARTIFICIAL SEQUENCE
  Synthetic Construct
RSKFAIK

SEQ ID NO: 15790 - protein, 7 aa, ARTIFICIAL SEQUENCE
  Synthetic Construct
RSKFALK

SEQ ID NO: 15791 - protein, 7 aa, ARTIFICIAL SEQUENCE
  Synthetic Construct
RSKFANK

SEQ ID NO: 15792 - protein, 7 aa, ARTIFICIAL SEQUENCE
  Synthetic Construct
RSKFAQK

SEQ ID NO: 15793 - protein, 7 aa, ARTIFICIAL SEQUENCE
  Synthetic Construct
RSKFARK

SEQ ID NO: 15794 - protein, 7 aa, ARTIFICIAL SEQUENCE
  Synthetic Construct
RSKFASK

SEQ ID NO: 15795 - protein, 7 aa, ARTIFICIAL SEQUENCE
  Synthetic Construct
RSKFATK

SEQ ID NO: 15796 - protein, 7 aa, ARTIFICIAL SEQUENCE
  Synthetic Construct
RSKFAYK

SEQ ID NO: 15797 - protein, 7 aa, ARTIFICIAL SEQUENCE
  Synthetic Construct
RSKFDAK

SEQ ID NO: 15798 - protein, 7 aa, ARTIFICIAL SEQUENCE
  Synthetic Construct
RSKFDDK

SEQ ID NO: 15799 - protein, 7 aa, ARTIFICIAL SEQUENCE
  Synthetic Construct
RSKFDEK

SEQ ID NO: 15800 - protein, 7 aa, ARTIFICIAL SEQUENCE
  Synthetic Construct
RSKFDFK

SEQ ID NO: 15801 - protein, 7 aa, ARTIFICIAL SEQUENCE
  Synthetic Construct
RSKFDGK

SEQ ID NO: 15802 - protein, 7 aa, ARTIFICIAL SEQUENCE
  Synthetic Construct
RSKFDHK

SEQ ID NO: 15803 - protein, 7 aa, ARTIFICIAL SEQUENCE
  Synthetic Construct
RSKFDIK

SEQ ID NO: 15804 - protein, 7 aa, ARTIFICIAL SEQUENCE
  Synthetic Construct
RSKFDLK

SEQ ID NO: 15805 - protein, 7 aa, ARTIFICIAL SEQUENCE
  Synthetic Construct
RSKFDNK

SEQ ID NO: 15806 - protein, 7 aa, ARTIFICIAL SEQUENCE
  Synthetic Construct
RSKFDQK

SEQ ID NO: 15807 - protein, 7 aa, ARTIFICIAL SEQUENCE
  Synthetic Construct
RSKFDRK

SEQ ID NO: 15808 - protein, 7 aa, ARTIFICIAL SEQUENCE
  Synthetic Construct
RSKFDSK

SEQ ID NO: 15809 - protein, 7 aa, ARTIFICIAL SEQUENCE
  Synthetic Construct
RSKFDTK

SEQ ID NO: 15810 - protein, 7 aa, ARTIFICIAL SEQUENCE
  Synthetic Construct
RSKFDYK

SEQ ID NO: 15811 - protein, 7 aa, ARTIFICIAL SEQUENCE
  Synthetic Construct
RSKFEAK

SEQ ID NO: 15812 - protein, 7 aa, ARTIFICIAL SEQUENCE
  Synthetic Construct
RSKFEDK

SEQ ID NO: 15813 - protein, 7 aa, ARTIFICIAL SEQUENCE
  Synthetic Construct
RSKFEEK

SEQ ID NO: 15814 - protein, 7 aa, ARTIFICIAL SEQUENCE
  Synthetic Construct
RSKFEFK

SEQ ID NO: 15815 - protein, 7 aa, ARTIFICIAL SEQUENCE
  Synthetic Construct
RSKFEGK

SEQ ID NO: 15816 - protein, 7 aa, ARTIFICIAL SEQUENCE
  Synthetic Construct
RSKFEHK

SEQ ID NO: 15817 - protein, 7 aa, ARTIFICIAL SEQUENCE
  Synthetic Construct
RSKFEIK

SEQ ID NO: 15818 - protein, 7 aa, ARTIFICIAL SEQUENCE
  Synthetic Construct
RSKFELK

SEQ ID NO: 15819 - protein, 7 aa, ARTIFICIAL SEQUENCE
  Synthetic Construct
RSKFENK

SEQ ID NO: 15820 - protein, 7 aa, ARTIFICIAL SEQUENCE
  Synthetic Construct
RSKFEQK

SEQ ID NO: 15821 - protein, 7 aa, ARTIFICIAL SEQUENCE
  Synthetic Construct
RSKFERK

SEQ ID NO: 15822 - protein, 7 aa, ARTIFICIAL SEQUENCE
  Synthetic Construct
RSKFESK

SEQ ID NO: 15823 - protein, 7 aa, ARTIFICIAL SEQUENCE
  Synthetic Construct
RSKFETK

SEQ ID NO: 15824 - protein, 7 aa, ARTIFICIAL SEQUENCE
  Synthetic Construct
RSKFEYK

SEQ ID NO: 15825 - protein, 7 aa, ARTIFICIAL SEQUENCE
  Synthetic Construct
RSKFFAK

SEQ ID NO: 15826 - protein, 7 aa, ARTIFICIAL SEQUENCE
  Synthetic Construct
RSKFFDK

SEQ ID NO: 15827 - protein, 7 aa, ARTIFICIAL SEQUENCE
  Synthetic Construct
RSKFFEK

SEQ ID NO: 15828 - protein, 7 aa, ARTIFICIAL SEQUENCE
  Synthetic Construct
RSKFFFK

SEQ ID NO: 15829 - protein, 7 aa, ARTIFICIAL SEQUENCE
  Synthetic Construct
RSKFFGK

SEQ ID NO: 15830 - protein, 7 aa, ARTIFICIAL SEQUENCE
  Synthetic Construct
RSKFFHK

SEQ ID NO: 15831 - protein, 7 aa, ARTIFICIAL SEQUENCE
  Synthetic Construct
RSKFFIK

SEQ ID NO: 15832 - protein, 7 aa, ARTIFICIAL SEQUENCE
  Synthetic Construct
RSKFFLK

SEQ ID NO: 15833 - protein, 7 aa, ARTIFICIAL SEQUENCE
  Synthetic Construct
RSKFFNK

SEQ ID NO: 15834 - protein, 7 aa, ARTIFICIAL SEQUENCE
  Synthetic Construct
RSKFFQK

SEQ ID NO: 15835 - protein, 7 aa, ARTIFICIAL SEQUENCE
  Synthetic Construct
RSKFFRK

SEQ ID NO: 15836 - protein, 7 aa, ARTIFICIAL SEQUENCE
  Synthetic Construct
RSKFFSK

SEQ ID NO: 15837 - protein, 7 aa, ARTIFICIAL SEQUENCE
  Synthetic Construct
RSKFFTK

SEQ ID NO: 15838 - protein, 7 aa, ARTIFICIAL SEQUENCE
  Synthetic Construct
RSKFFYK

SEQ ID NO: 15839 - protein, 7 aa, ARTIFICIAL SEQUENCE
  Synthetic Construct
RSKFGAK

SEQ ID NO: 15840 - protein, 7 aa, ARTIFICIAL SEQUENCE
  Synthetic Construct
RSKFGDK

SEQ ID NO: 15841 - protein, 7 aa, ARTIFICIAL SEQUENCE
  Synthetic Construct
RSKFGEK

SEQ ID NO: 15842 - protein, 7 aa, ARTIFICIAL SEQUENCE
  Synthetic Construct
RSKFGFK

SEQ ID NO: 15843 - protein, 7 aa, ARTIFICIAL SEQUENCE
  Synthetic Construct
RSKFGGK

SEQ ID NO: 15844 - protein, 7 aa, ARTIFICIAL SEQUENCE
  Synthetic Construct
RSKFGHK

SEQ ID NO: 15845 - protein, 7 aa, ARTIFICIAL SEQUENCE
  Synthetic Construct
RSKFGIK

SEQ ID NO: 15846 - protein, 7 aa, ARTIFICIAL SEQUENCE
  Synthetic Construct
RSKFGLK

SEQ ID NO: 15847 - protein, 7 aa, ARTIFICIAL SEQUENCE
  Synthetic Construct
RSKFGNK

SEQ ID NO: 15848 - protein, 7 aa, ARTIFICIAL SEQUENCE
  Synthetic Construct
RSKFGQK

SEQ ID NO: 15849 - protein, 7 aa, ARTIFICIAL SEQUENCE
  Synthetic Construct
RSKFGRK

SEQ ID NO: 15850 - protein, 7 aa, ARTIFICIAL SEQUENCE
  Synthetic Construct
RSKFGSK

SEQ ID NO: 15851 - protein, 7 aa, ARTIFICIAL SEQUENCE
  Synthetic Construct
RSKFGTK

SEQ ID NO: 15852 - protein, 7 aa, ARTIFICIAL SEQUENCE
  Synthetic Construct
RSKFGYK

SEQ ID NO: 15853 - protein, 7 aa, ARTIFICIAL SEQUENCE
  Synthetic Construct
RSKFHAK

SEQ ID NO: 15854 - protein, 7 aa, ARTIFICIAL SEQUENCE
  Synthetic Construct
RSKFHDK

SEQ ID NO: 15855 - protein, 7 aa, ARTIFICIAL SEQUENCE
  Synthetic Construct
RSKFHEK

SEQ ID NO: 15856 - protein, 7 aa, ARTIFICIAL SEQUENCE
  Synthetic Construct
RSKFHFK

SEQ ID NO: 15857 - protein, 7 aa, ARTIFICIAL SEQUENCE
  Synthetic Construct
RSKFHGK

SEQ ID NO: 15858 - protein, 7 aa, ARTIFICIAL SEQUENCE
  Synthetic Construct
RSKFHHK

SEQ ID NO: 15859 - protein, 7 aa, ARTIFICIAL SEQUENCE
  Synthetic Construct
RSKFHIK

SEQ ID NO: 15860 - protein, 7 aa, ARTIFICIAL SEQUENCE
  Synthetic Construct
RSKFHLK

SEQ ID NO: 15861 - protein, 7 aa, ARTIFICIAL SEQUENCE
  Synthetic Construct
RSKFHNK

SEQ ID NO: 15862 - protein, 7 aa, ARTIFICIAL SEQUENCE
  Synthetic Construct
RSKFHQK

SEQ ID NO: 15863 - protein, 7 aa, ARTIFICIAL SEQUENCE
  Synthetic Construct
RSKFHRK

SEQ ID NO: 15864 - protein, 7 aa, ARTIFICIAL SEQUENCE
  Synthetic Construct
RSKFHSK

SEQ ID NO: 15865 - protein, 7 aa, ARTIFICIAL SEQUENCE
  Synthetic Construct
RSKFHTK

SEQ ID NO: 15866 - protein, 7 aa, ARTIFICIAL SEQUENCE
  Synthetic Construct
RSKFHYK

SEQ ID NO: 15867 - protein, 7 aa, ARTIFICIAL SEQUENCE
  Synthetic Construct
RSKFIAK

SEQ ID NO: 15868 - protein, 7 aa, ARTIFICIAL SEQUENCE
  Synthetic Construct
RSKFIDK

SEQ ID NO: 15869 - protein, 7 aa, ARTIFICIAL SEQUENCE
  Synthetic Construct
RSKFIEK

SEQ ID NO: 15870 - protein, 7 aa, ARTIFICIAL SEQUENCE
  Synthetic Construct
RSKFIFK

SEQ ID NO: 15871 - protein, 7 aa, ARTIFICIAL SEQUENCE
  Synthetic Construct
RSKFIGK

SEQ ID NO: 15872 - protein, 7 aa, ARTIFICIAL SEQUENCE
  Synthetic Construct
RSKFIHK

SEQ ID NO: 15873 - protein, 7 aa, ARTIFICIAL SEQUENCE
  Synthetic Construct
RSKFIIK

SEQ ID NO: 15874 - protein, 7 aa, ARTIFICIAL SEQUENCE
  Synthetic Construct
RSKFILK

SEQ ID NO: 15875 - protein, 7 aa, ARTIFICIAL SEQUENCE
  Synthetic Construct
RSKFINK

SEQ ID NO: 15876 - protein, 7 aa, ARTIFICIAL SEQUENCE
  Synthetic Construct
RSKFIQK

SEQ ID NO: 15877 - protein, 7 aa, ARTIFICIAL SEQUENCE
  Synthetic Construct
RSKFIRK

SEQ ID NO: 15878 - protein, 7 aa, ARTIFICIAL SEQUENCE
  Synthetic Construct
RSKFISK

SEQ ID NO: 15879 - protein, 7 aa, ARTIFICIAL SEQUENCE
  Synthetic Construct
RSKFITK

SEQ ID NO: 15880 - protein, 7 aa, ARTIFICIAL SEQUENCE
  Synthetic Construct
RSKFIYK

SEQ ID NO: 15881 - protein, 7 aa, ARTIFICIAL SEQUENCE
  Synthetic Construct
RSKFLAK

SEQ ID NO: 15882 - protein, 7 aa, ARTIFICIAL SEQUENCE
  Synthetic Construct
RSKFLDK

SEQ ID NO: 15883 - protein, 7 aa, ARTIFICIAL SEQUENCE
  Synthetic Construct
RSKFLEK

SEQ ID NO: 15884 - protein, 7 aa, ARTIFICIAL SEQUENCE
  Synthetic Construct
RSKFLFK

SEQ ID NO: 15885 - protein, 7 aa, ARTIFICIAL SEQUENCE
  Synthetic Construct
RSKFLGK

SEQ ID NO: 15886 - protein, 7 aa, ARTIFICIAL SEQUENCE
  Synthetic Construct
RSKFLHK

SEQ ID NO: 15887 - protein, 7 aa, ARTIFICIAL SEQUENCE
  Synthetic Construct
RSKFLIK

SEQ ID NO: 15888 - protein, 7 aa, ARTIFICIAL SEQUENCE
  Synthetic Construct
RSKFLLK

SEQ ID NO: 15889 - protein, 7 aa, ARTIFICIAL SEQUENCE
  Synthetic Construct
RSKFLNK

SEQ ID NO: 15890 - protein, 7 aa, ARTIFICIAL SEQUENCE
  Synthetic Construct
RSKFLQK

SEQ ID NO: 15891 - protein, 7 aa, ARTIFICIAL SEQUENCE
  Synthetic Construct
RSKFLRK

SEQ ID NO: 15892 - protein, 7 aa, ARTIFICIAL SEQUENCE
  Synthetic Construct
RSKFLSK

SEQ ID NO: 15893 - protein, 7 aa, ARTIFICIAL SEQUENCE
  Synthetic Construct
RSKFLTK

SEQ ID NO: 15894 - protein, 7 aa, ARTIFICIAL SEQUENCE
  Synthetic Construct
RSKFLYK

SEQ ID NO: 15895 - protein, 7 aa, ARTIFICIAL SEQUENCE
  Synthetic Construct
RSKFNAK

SEQ ID NO: 15896 - protein, 7 aa, ARTIFICIAL SEQUENCE
  Synthetic Construct
RSKFNDK

SEQ ID NO: 15897 - protein, 7 aa, ARTIFICIAL SEQUENCE
  Synthetic Construct
RSKFNEK

SEQ ID NO: 15898 - protein, 7 aa, ARTIFICIAL SEQUENCE
  Synthetic Construct
RSKFNFK

SEQ ID NO: 15899 - protein, 7 aa, ARTIFICIAL SEQUENCE
  Synthetic Construct
RSKFNGK

SEQ ID NO: 15900 - protein, 7 aa, ARTIFICIAL SEQUENCE
  Synthetic Construct
RSKFNHK

SEQ ID NO: 15901 - protein, 7 aa, ARTIFICIAL SEQUENCE
  Synthetic Construct
RSKFNIK

SEQ ID NO: 15902 - protein, 7 aa, ARTIFICIAL SEQUENCE
  Synthetic Construct
RSKFNLK

SEQ ID NO: 15903 - protein, 7 aa, ARTIFICIAL SEQUENCE
  Synthetic Construct
RSKFNNK

SEQ ID NO: 15904 - protein, 7 aa, ARTIFICIAL SEQUENCE
  Synthetic Construct
RSKFNQK

SEQ ID NO: 15905 - protein, 7 aa, ARTIFICIAL SEQUENCE
  Synthetic Construct
RSKFNRK

SEQ ID NO: 15906 - protein, 7 aa, ARTIFICIAL SEQUENCE
  Synthetic Construct
RSKFNSK

SEQ ID NO: 15907 - protein, 7 aa, ARTIFICIAL SEQUENCE
  Synthetic Construct
RSKFNTK

SEQ ID NO: 15908 - protein, 7 aa, ARTIFICIAL SEQUENCE
  Synthetic Construct
RSKFNYK

SEQ ID NO: 15909 - protein, 7 aa, ARTIFICIAL SEQUENCE
  Synthetic Construct
RSKFQAK

SEQ ID NO: 15910 - protein, 7 aa, ARTIFICIAL SEQUENCE
  Synthetic Construct
RSKFQDK

SEQ ID NO: 15911 - protein, 7 aa, ARTIFICIAL SEQUENCE
  Synthetic Construct
RSKFQEK

SEQ ID NO: 15912 - protein, 7 aa, ARTIFICIAL SEQUENCE
  Synthetic Construct
RSKFQFK

SEQ ID NO: 15913 - protein, 7 aa, ARTIFICIAL SEQUENCE
  Synthetic Construct
RSKFQGK

SEQ ID NO: 15914 - protein, 7 aa, ARTIFICIAL SEQUENCE
  Synthetic Construct
RSKFQHK

SEQ ID NO: 15915 - protein, 7 aa, ARTIFICIAL SEQUENCE
  Synthetic Construct
RSKFQIK

SEQ ID NO: 15916 - protein, 7 aa, ARTIFICIAL SEQUENCE
  Synthetic Construct
RSKFQLK

SEQ ID NO: 15917 - protein, 7 aa, ARTIFICIAL SEQUENCE
  Synthetic Construct
RSKFQNK

SEQ ID NO: 15918 - protein, 7 aa, ARTIFICIAL SEQUENCE
  Synthetic Construct
RSKFQQK

SEQ ID NO: 15919 - protein, 7 aa, ARTIFICIAL SEQUENCE
  Synthetic Construct
RSKFQRK

SEQ ID NO: 15920 - protein, 7 aa, ARTIFICIAL SEQUENCE
  Synthetic Construct
RSKFQSK

SEQ ID NO: 15921 - protein, 7 aa, ARTIFICIAL SEQUENCE
  Synthetic Construct
RSKFQTK

SEQ ID NO: 15922 - protein, 7 aa, ARTIFICIAL SEQUENCE
  Synthetic Construct
RSKFQYK

SEQ ID NO: 15923 - protein, 7 aa, ARTIFICIAL SEQUENCE
  Synthetic Construct
RSKFRAK

SEQ ID NO: 15924 - protein, 7 aa, ARTIFICIAL SEQUENCE
  Synthetic Construct
RSKFRDK

SEQ ID NO: 15925 - protein, 7 aa, ARTIFICIAL SEQUENCE
  Synthetic Construct
RSKFREK

SEQ ID NO: 15926 - protein, 7 aa, ARTIFICIAL SEQUENCE
  Synthetic Construct
RSKFRFK

SEQ ID NO: 15927 - protein, 7 aa, ARTIFICIAL SEQUENCE
  Synthetic Construct
RSKFRGK

SEQ ID NO: 15928 - protein, 7 aa, ARTIFICIAL SEQUENCE
  Synthetic Construct
RSKFRHK

SEQ ID NO: 15929 - protein, 7 aa, ARTIFICIAL SEQUENCE
  Synthetic Construct
RSKFRIK

SEQ ID NO: 15930 - protein, 7 aa, ARTIFICIAL SEQUENCE
  Synthetic Construct
RSKFRLK

SEQ ID NO: 15931 - protein, 7 aa, ARTIFICIAL SEQUENCE
  Synthetic Construct
RSKFRNK

SEQ ID NO: 15932 - protein, 7 aa, ARTIFICIAL SEQUENCE
  Synthetic Construct
RSKFRQK

SEQ ID NO: 15933 - protein, 7 aa, ARTIFICIAL SEQUENCE
  Synthetic Construct
RSKFRRK

SEQ ID NO: 15934 - protein, 7 aa, ARTIFICIAL SEQUENCE
  Synthetic Construct
RSKFRSK

SEQ ID NO: 15935 - protein, 7 aa, ARTIFICIAL SEQUENCE
  Synthetic Construct
RSKFRTK

SEQ ID NO: 15936 - protein, 7 aa, ARTIFICIAL SEQUENCE
  Synthetic Construct
RSKFRYK

SEQ ID NO: 15937 - protein, 7 aa, ARTIFICIAL SEQUENCE
  Synthetic Construct
RSKFSAK

SEQ ID NO: 15938 - protein, 7 aa, ARTIFICIAL SEQUENCE
  Synthetic Construct
RSKFSDK

SEQ ID NO: 15939 - protein, 7 aa, ARTIFICIAL SEQUENCE
  Synthetic Construct
RSKFSEK

SEQ ID NO: 15940 - protein, 7 aa, ARTIFICIAL SEQUENCE
  Synthetic Construct
RSKFSFK

SEQ ID NO: 15941 - protein, 7 aa, ARTIFICIAL SEQUENCE
  Synthetic Construct
RSKFSGK

SEQ ID NO: 15942 - protein, 7 aa, ARTIFICIAL SEQUENCE
  Synthetic Construct
RSKFSHK

SEQ ID NO: 15943 - protein, 7 aa, ARTIFICIAL SEQUENCE
  Synthetic Construct
RSKFSIK

SEQ ID NO: 15944 - protein, 7 aa, ARTIFICIAL SEQUENCE
  Synthetic Construct
RSKFSLK

SEQ ID NO: 15945 - protein, 7 aa, ARTIFICIAL SEQUENCE
  Synthetic Construct
RSKFSNK

SEQ ID NO: 15946 - protein, 7 aa, ARTIFICIAL SEQUENCE
  Synthetic Construct
RSKFSQK

SEQ ID NO: 15947 - protein, 7 aa, ARTIFICIAL SEQUENCE
  Synthetic Construct
RSKFSRK

SEQ ID NO: 15948 - protein, 7 aa, ARTIFICIAL SEQUENCE
  Synthetic Construct
RSKFSSK

SEQ ID NO: 15949 - protein, 7 aa, ARTIFICIAL SEQUENCE
  Synthetic Construct
RSKFSTK

SEQ ID NO: 15950 - protein, 7 aa, ARTIFICIAL SEQUENCE
  Synthetic Construct
RSKFSYK

SEQ ID NO: 15951 - protein, 7 aa, ARTIFICIAL SEQUENCE
  Synthetic Construct
RSKFTAK

SEQ ID NO: 15952 - protein, 7 aa, ARTIFICIAL SEQUENCE
  Synthetic Construct
RSKFTDK

SEQ ID NO: 15953 - protein, 7 aa, ARTIFICIAL SEQUENCE
  Synthetic Construct
RSKFTEK

SEQ ID NO: 15954 - protein, 7 aa, ARTIFICIAL SEQUENCE
  Synthetic Construct
RSKFTFK

SEQ ID NO: 15955 - protein, 7 aa, ARTIFICIAL SEQUENCE
  Synthetic Construct
RSKFTGK

SEQ ID NO: 15956 - protein, 7 aa, ARTIFICIAL SEQUENCE
  Synthetic Construct
RSKFTHK

SEQ ID NO: 15957 - protein, 7 aa, ARTIFICIAL SEQUENCE
  Synthetic Construct
RSKFTIK

SEQ ID NO: 15958 - protein, 7 aa, ARTIFICIAL SEQUENCE
  Synthetic Construct
RSKFTLK

SEQ ID NO: 15959 - protein, 7 aa, ARTIFICIAL SEQUENCE
  Synthetic Construct
RSKFTNK

SEQ ID NO: 15960 - protein, 7 aa, ARTIFICIAL SEQUENCE
  Synthetic Construct
RSKFTQK

SEQ ID NO: 15961 - protein, 7 aa, ARTIFICIAL SEQUENCE
  Synthetic Construct
RSKFTRK

SEQ ID NO: 15962 - protein, 7 aa, ARTIFICIAL SEQUENCE
  Synthetic Construct
RSKFTSK

SEQ ID NO: 15963 - protein, 7 aa, ARTIFICIAL SEQUENCE
  Synthetic Construct
RSKFTTK

SEQ ID NO: 15964 - protein, 7 aa, ARTIFICIAL SEQUENCE
  Synthetic Construct
RSKFTYK

SEQ ID NO: 15965 - protein, 7 aa, ARTIFICIAL SEQUENCE
  Synthetic Construct
RSKFYAK

SEQ ID NO: 15966 - protein, 7 aa, ARTIFICIAL SEQUENCE
  Synthetic Construct
RSKFYDK

SEQ ID NO: 15967 - protein, 7 aa, ARTIFICIAL SEQUENCE
  Synthetic Construct
RSKFYEK

SEQ ID NO: 15968 - protein, 7 aa, ARTIFICIAL SEQUENCE
  Synthetic Construct
RSKFYFK

SEQ ID NO: 15969 - protein, 7 aa, ARTIFICIAL SEQUENCE
  Synthetic Construct
RSKFYGK

SEQ ID NO: 15970 - protein, 7 aa, ARTIFICIAL SEQUENCE
  Synthetic Construct
RSKFYHK

SEQ ID NO: 15971 - protein, 7 aa, ARTIFICIAL SEQUENCE
  Synthetic Construct
RSKFYIK

SEQ ID NO: 15972 - protein, 7 aa, ARTIFICIAL SEQUENCE
  Synthetic Construct
RSKFYLK

SEQ ID NO: 15973 - protein, 7 aa, ARTIFICIAL SEQUENCE
  Synthetic Construct
RSKFYNK

SEQ ID NO: 15974 - protein, 7 aa, ARTIFICIAL SEQUENCE
  Synthetic Construct
RSKFYQK

SEQ ID NO: 15975 - protein, 7 aa, ARTIFICIAL SEQUENCE
  Synthetic Construct
RSKFYRK

SEQ ID NO: 15976 - protein, 7 aa, ARTIFICIAL SEQUENCE
  Synthetic Construct
RSKFYSK

SEQ ID NO: 15977 - protein, 7 aa, ARTIFICIAL SEQUENCE
  Synthetic Construct
RSKFYTK

SEQ ID NO: 15978 - protein, 7 aa, ARTIFICIAL SEQUENCE
  Synthetic Construct
RSKFYYK

SEQ ID NO: 15979 - protein, 7 aa, ARTIFICIAL SEQUENCE
  Synthetic Construct
RSKGAAK

SEQ ID NO: 15980 - protein, 7 aa, ARTIFICIAL SEQUENCE
  Synthetic Construct
RSKGADK

SEQ ID NO: 15981 - protein, 7 aa, ARTIFICIAL SEQUENCE
  Synthetic Construct
RSKGAEK

SEQ ID NO: 15982 - protein, 7 aa, ARTIFICIAL SEQUENCE
  Synthetic Construct
RSKGAFK

SEQ ID NO: 15983 - protein, 7 aa, ARTIFICIAL SEQUENCE
  Synthetic Construct
RSKGAGK

SEQ ID NO: 15984 - protein, 7 aa, ARTIFICIAL SEQUENCE
  Synthetic Construct
RSKGAHK

SEQ ID NO: 15985 - protein, 7 aa, ARTIFICIAL SEQUENCE
  Synthetic Construct
RSKGAIK

SEQ ID NO: 15986 - protein, 7 aa, ARTIFICIAL SEQUENCE
  Synthetic Construct
RSKGALK

SEQ ID NO: 15987 - protein, 7 aa, ARTIFICIAL SEQUENCE
  Synthetic Construct
RSKGANK

SEQ ID NO: 15988 - protein, 7 aa, ARTIFICIAL SEQUENCE
  Synthetic Construct
RSKGAQK

SEQ ID NO: 15989 - protein, 7 aa, ARTIFICIAL SEQUENCE
  Synthetic Construct
RSKGARK

SEQ ID NO: 15990 - protein, 7 aa, ARTIFICIAL SEQUENCE
  Synthetic Construct
RSKGASK

SEQ ID NO: 15991 - protein, 7 aa, ARTIFICIAL SEQUENCE
  Synthetic Construct
RSKGATK

SEQ ID NO: 15992 - protein, 7 aa, ARTIFICIAL SEQUENCE
  Synthetic Construct
RSKGAYK

SEQ ID NO: 15993 - protein, 7 aa, ARTIFICIAL SEQUENCE
  Synthetic Construct
RSKGDAK

SEQ ID NO: 15994 - protein, 7 aa, ARTIFICIAL SEQUENCE
  Synthetic Construct
RSKGDDK

SEQ ID NO: 15995 - protein, 7 aa, ARTIFICIAL SEQUENCE
  Synthetic Construct
RSKGDEK

SEQ ID NO: 15996 - protein, 7 aa, ARTIFICIAL SEQUENCE
  Synthetic Construct
RSKGDFK

SEQ ID NO: 15997 - protein, 7 aa, ARTIFICIAL SEQUENCE
  Synthetic Construct
RSKGDGK

SEQ ID NO: 15998 - protein, 7 aa, ARTIFICIAL SEQUENCE
  Synthetic Construct
RSKGDHK

SEQ ID NO: 15999 - protein, 7 aa, ARTIFICIAL SEQUENCE
  Synthetic Construct
RSKGDIK

SEQ ID NO: 16000 - protein, 7 aa, ARTIFICIAL SEQUENCE
  Synthetic Construct
RSKGDLK

SEQ ID NO: 16001 - protein, 7 aa, ARTIFICIAL SEQUENCE
  Synthetic Construct
RSKGDNK

SEQ ID NO: 16002 - protein, 7 aa, ARTIFICIAL SEQUENCE
  Synthetic Construct
RSKGDQK

SEQ ID NO: 16003 - protein, 7 aa, ARTIFICIAL SEQUENCE
  Synthetic Construct
RSKGDRK

SEQ ID NO: 16004 - protein, 7 aa, ARTIFICIAL SEQUENCE
  Synthetic Construct
RSKGDSK

SEQ ID NO: 16005 - protein, 7 aa, ARTIFICIAL SEQUENCE
  Synthetic Construct
RSKGDTK

SEQ ID NO: 16006 - protein, 7 aa, ARTIFICIAL SEQUENCE
  Synthetic Construct
RSKGDYK

SEQ ID NO: 16007 - protein, 7 aa, ARTIFICIAL SEQUENCE
  Synthetic Construct
RSKGEAK

SEQ ID NO: 16008 - protein, 7 aa, ARTIFICIAL SEQUENCE
  Synthetic Construct
RSKGEDK

SEQ ID NO: 16009 - protein, 7 aa, ARTIFICIAL SEQUENCE
  Synthetic Construct
RSKGEEK

SEQ ID NO: 16010 - protein, 7 aa, ARTIFICIAL SEQUENCE
  Synthetic Construct
RSKGEFK

SEQ ID NO: 16011 - protein, 7 aa, ARTIFICIAL SEQUENCE
  Synthetic Construct
RSKGEGK

SEQ ID NO: 16012 - protein, 7 aa, ARTIFICIAL SEQUENCE
  Synthetic Construct
RSKGEHK

SEQ ID NO: 16013 - protein, 7 aa, ARTIFICIAL SEQUENCE
  Synthetic Construct
RSKGEIK

SEQ ID NO: 16014 - protein, 7 aa, ARTIFICIAL SEQUENCE
  Synthetic Construct
RSKGELK

SEQ ID NO: 16015 - protein, 7 aa, ARTIFICIAL SEQUENCE
  Synthetic Construct
RSKGENK

SEQ ID NO: 16016 - protein, 7 aa, ARTIFICIAL SEQUENCE
  Synthetic Construct
RSKGEQK

SEQ ID NO: 16017 - protein, 7 aa, ARTIFICIAL SEQUENCE
  Synthetic Construct
RSKGERK

SEQ ID NO: 16018 - protein, 7 aa, ARTIFICIAL SEQUENCE
  Synthetic Construct
RSKGESK

SEQ ID NO: 16019 - protein, 7 aa, ARTIFICIAL SEQUENCE
  Synthetic Construct
RSKGETK

SEQ ID NO: 16020 - protein, 7 aa, ARTIFICIAL SEQUENCE
  Synthetic Construct
RSKGEYK

SEQ ID NO: 16021 - protein, 7 aa, ARTIFICIAL SEQUENCE
  Synthetic Construct
RSKGFAK

SEQ ID NO: 16022 - protein, 7 aa, ARTIFICIAL SEQUENCE
  Synthetic Construct
RSKGFDK

SEQ ID NO: 16023 - protein, 7 aa, ARTIFICIAL SEQUENCE
  Synthetic Construct
RSKGFEK

SEQ ID NO: 16024 - protein, 7 aa, ARTIFICIAL SEQUENCE
  Synthetic Construct
RSKGFFK

SEQ ID NO: 16025 - protein, 7 aa, ARTIFICIAL SEQUENCE
  Synthetic Construct
RSKGFGK

SEQ ID NO: 16026 - protein, 7 aa, ARTIFICIAL SEQUENCE
  Synthetic Construct
RSKGFHK

SEQ ID NO: 16027 - protein, 7 aa, ARTIFICIAL SEQUENCE
  Synthetic Construct
RSKGFIK

SEQ ID NO: 16028 - protein, 7 aa, ARTIFICIAL SEQUENCE
  Synthetic Construct
RSKGFLK

SEQ ID NO: 16029 - protein, 7 aa, ARTIFICIAL SEQUENCE
  Synthetic Construct
RSKGFNK

SEQ ID NO: 16030 - protein, 7 aa, ARTIFICIAL SEQUENCE
  Synthetic Construct
RSKGFQK

SEQ ID NO: 16031 - protein, 7 aa, ARTIFICIAL SEQUENCE
  Synthetic Construct
RSKGFRK

SEQ ID NO: 16032 - protein, 7 aa, ARTIFICIAL SEQUENCE
  Synthetic Construct
RSKGFSK

SEQ ID NO: 16033 - protein, 7 aa, ARTIFICIAL SEQUENCE
  Synthetic Construct
RSKGFTK

SEQ ID NO: 16034 - protein, 7 aa, ARTIFICIAL SEQUENCE
  Synthetic Construct
RSKGFYK

SEQ ID NO: 16035 - protein, 7 aa, ARTIFICIAL SEQUENCE
  Synthetic Construct
RSKGGAK

SEQ ID NO: 16036 - protein, 7 aa, ARTIFICIAL SEQUENCE
  Synthetic Construct
RSKGGDK

SEQ ID NO: 16037 - protein, 7 aa, ARTIFICIAL SEQUENCE
  Synthetic Construct
RSKGGEK

SEQ ID NO: 16038 - protein, 7 aa, ARTIFICIAL SEQUENCE
  Synthetic Construct
RSKGGFK

SEQ ID NO: 16039 - protein, 7 aa, ARTIFICIAL SEQUENCE
  Synthetic Construct
RSKGGGK

SEQ ID NO: 16040 - protein, 7 aa, ARTIFICIAL SEQUENCE
  Synthetic Construct
RSKGGHK

SEQ ID NO: 16041 - protein, 7 aa, ARTIFICIAL SEQUENCE
  Synthetic Construct
RSKGGIK

SEQ ID NO: 16042 - protein, 7 aa, ARTIFICIAL SEQUENCE
  Synthetic Construct
RSKGGLK

SEQ ID NO: 16043 - protein, 7 aa, ARTIFICIAL SEQUENCE
  Synthetic Construct
RSKGGNK

SEQ ID NO: 16044 - protein, 7 aa, ARTIFICIAL SEQUENCE
  Synthetic Construct
RSKGGQK

SEQ ID NO: 16045 - protein, 7 aa, ARTIFICIAL SEQUENCE
  Synthetic Construct
RSKGGRK

SEQ ID NO: 16046 - protein, 7 aa, ARTIFICIAL SEQUENCE
  Synthetic Construct
RSKGGSK

SEQ ID NO: 16047 - protein, 7 aa, ARTIFICIAL SEQUENCE
  Synthetic Construct
RSKGGTK

SEQ ID NO: 16048 - protein, 7 aa, ARTIFICIAL SEQUENCE
  Synthetic Construct
RSKGGYK

SEQ ID NO: 16049 - protein, 7 aa, ARTIFICIAL SEQUENCE
  Synthetic Construct
RSKGHAK

SEQ ID NO: 16050 - protein, 7 aa, ARTIFICIAL SEQUENCE
  Synthetic Construct
RSKGHDK

SEQ ID NO: 16051 - protein, 7 aa, ARTIFICIAL SEQUENCE
  Synthetic Construct
RSKGHEK

SEQ ID NO: 16052 - protein, 7 aa, ARTIFICIAL SEQUENCE
  Synthetic Construct
RSKGHFK

SEQ ID NO: 16053 - protein, 7 aa, ARTIFICIAL SEQUENCE
  Synthetic Construct
RSKGHGK

SEQ ID NO: 16054 - protein, 7 aa, ARTIFICIAL SEQUENCE
  Synthetic Construct
RSKGHHK

SEQ ID NO: 16055 - protein, 7 aa, ARTIFICIAL SEQUENCE
  Synthetic Construct
RSKGHIK

SEQ ID NO: 16056 - protein, 7 aa, ARTIFICIAL SEQUENCE
  Synthetic Construct
RSKGHLK

SEQ ID NO: 16057 - protein, 7 aa, ARTIFICIAL SEQUENCE
  Synthetic Construct
RSKGHNK

SEQ ID NO: 16058 - protein, 7 aa, ARTIFICIAL SEQUENCE
  Synthetic Construct
RSKGHQK

SEQ ID NO: 16059 - protein, 7 aa, ARTIFICIAL SEQUENCE
  Synthetic Construct
RSKGHRK

SEQ ID NO: 16060 - protein, 7 aa, ARTIFICIAL SEQUENCE
  Synthetic Construct
RSKGHSK

SEQ ID NO: 16061 - protein, 7 aa, ARTIFICIAL SEQUENCE
  Synthetic Construct
RSKGHTK

SEQ ID NO: 16062 - protein, 7 aa, ARTIFICIAL SEQUENCE
  Synthetic Construct
RSKGHYK

SEQ ID NO: 16063 - protein, 7 aa, ARTIFICIAL SEQUENCE
  Synthetic Construct
RSKGIAK

SEQ ID NO: 16064 - protein, 7 aa, ARTIFICIAL SEQUENCE
  Synthetic Construct
RSKGIDK

SEQ ID NO: 16065 - protein, 7 aa, ARTIFICIAL SEQUENCE
  Synthetic Construct
RSKGIEK

SEQ ID NO: 16066 - protein, 7 aa, ARTIFICIAL SEQUENCE
  Synthetic Construct
RSKGIFK

SEQ ID NO: 16067 - protein, 7 aa, ARTIFICIAL SEQUENCE
  Synthetic Construct
RSKGIGK

SEQ ID NO: 16068 - protein, 7 aa, ARTIFICIAL SEQUENCE
  Synthetic Construct
RSKGIHK

SEQ ID NO: 16069 - protein, 7 aa, ARTIFICIAL SEQUENCE
  Synthetic Construct
RSKGIIK

SEQ ID NO: 16070 - protein, 7 aa, ARTIFICIAL SEQUENCE
  Synthetic Construct
RSKGILK

SEQ ID NO: 16071 - protein, 7 aa, ARTIFICIAL SEQUENCE
  Synthetic Construct
RSKGINK

SEQ ID NO: 16072 - protein, 7 aa, ARTIFICIAL SEQUENCE
  Synthetic Construct
RSKGIQK

SEQ ID NO: 16073 - protein, 7 aa, ARTIFICIAL SEQUENCE
  Synthetic Construct
RSKGIRK

SEQ ID NO: 16074 - protein, 7 aa, ARTIFICIAL SEQUENCE
  Synthetic Construct
RSKGISK

SEQ ID NO: 16075 - protein, 7 aa, ARTIFICIAL SEQUENCE
  Synthetic Construct
RSKGITK

SEQ ID NO: 16076 - protein, 7 aa, ARTIFICIAL SEQUENCE
  Synthetic Construct
RSKGIYK

SEQ ID NO: 16077 - protein, 7 aa, ARTIFICIAL SEQUENCE
  Synthetic Construct
RSKGLAK

SEQ ID NO: 16078 - protein, 7 aa, ARTIFICIAL SEQUENCE
  Synthetic Construct
RSKGLDK

SEQ ID NO: 16079 - protein, 7 aa, ARTIFICIAL SEQUENCE
  Synthetic Construct
RSKGLEK

SEQ ID NO: 16080 - protein, 7 aa, ARTIFICIAL SEQUENCE
  Synthetic Construct
RSKGLFK

SEQ ID NO: 16081 - protein, 7 aa, ARTIFICIAL SEQUENCE
  Synthetic Construct
RSKGLGK

SEQ ID NO: 16082 - protein, 7 aa, ARTIFICIAL SEQUENCE
  Synthetic Construct
RSKGLHK

SEQ ID NO: 16083 - protein, 7 aa, ARTIFICIAL SEQUENCE
  Synthetic Construct
RSKGLIK

SEQ ID NO: 16084 - protein, 7 aa, ARTIFICIAL SEQUENCE
  Synthetic Construct
RSKGLLK

SEQ ID NO: 16085 - protein, 7 aa, ARTIFICIAL SEQUENCE
  Synthetic Construct
RSKGLNK

SEQ ID NO: 16086 - protein, 7 aa, ARTIFICIAL SEQUENCE
  Synthetic Construct
RSKGLQK

SEQ ID NO: 16087 - protein, 7 aa, ARTIFICIAL SEQUENCE
  Synthetic Construct
RSKGLRK

SEQ ID NO: 16088 - protein, 7 aa, ARTIFICIAL SEQUENCE
  Synthetic Construct
RSKGLSK

SEQ ID NO: 16089 - protein, 7 aa, ARTIFICIAL SEQUENCE
  Synthetic Construct
RSKGLTK

SEQ ID NO: 16090 - protein, 7 aa, ARTIFICIAL SEQUENCE
  Synthetic Construct
RSKGLYK

SEQ ID NO: 16091 - protein, 7 aa, ARTIFICIAL SEQUENCE
  Synthetic Construct
RSKGNAK

SEQ ID NO: 16092 - protein, 7 aa, ARTIFICIAL SEQUENCE
  Synthetic Construct
RSKGNDK

SEQ ID NO: 16093 - protein, 7 aa, ARTIFICIAL SEQUENCE
  Synthetic Construct
RSKGNEK

SEQ ID NO: 16094 - protein, 7 aa, ARTIFICIAL SEQUENCE
  Synthetic Construct
RSKGNFK

SEQ ID NO: 16095 - protein, 7 aa, ARTIFICIAL SEQUENCE
  Synthetic Construct
RSKGNGK

SEQ ID NO: 16096 - protein, 7 aa, ARTIFICIAL SEQUENCE
  Synthetic Construct
RSKGNHK

SEQ ID NO: 16097 - protein, 7 aa, ARTIFICIAL SEQUENCE
  Synthetic Construct
RSKGNIK

SEQ ID NO: 16098 - protein, 7 aa, ARTIFICIAL SEQUENCE
  Synthetic Construct
RSKGNLK

SEQ ID NO: 16099 - protein, 7 aa, ARTIFICIAL SEQUENCE
  Synthetic Construct
RSKGNNK

SEQ ID NO: 16100 - protein, 7 aa, ARTIFICIAL SEQUENCE
  Synthetic Construct
RSKGNQK

SEQ ID NO: 16101 - protein, 7 aa, ARTIFICIAL SEQUENCE
  Synthetic Construct
RSKGNRK

SEQ ID NO: 16102 - protein, 7 aa, ARTIFICIAL SEQUENCE
  Synthetic Construct
RSKGNSK

SEQ ID NO: 16103 - protein, 7 aa, ARTIFICIAL SEQUENCE
  Synthetic Construct
RSKGNTK

SEQ ID NO: 16104 - protein, 7 aa, ARTIFICIAL SEQUENCE
  Synthetic Construct
RSKGNYK

SEQ ID NO: 16105 - protein, 7 aa, ARTIFICIAL SEQUENCE
  Synthetic Construct
RSKGQAK

SEQ ID NO: 16106 - protein, 7 aa, ARTIFICIAL SEQUENCE
  Synthetic Construct
RSKGQDK

SEQ ID NO: 16107 - protein, 7 aa, ARTIFICIAL SEQUENCE
  Synthetic Construct
RSKGQEK

SEQ ID NO: 16108 - protein, 7 aa, ARTIFICIAL SEQUENCE
  Synthetic Construct
RSKGQFK

SEQ ID NO: 16109 - protein, 7 aa, ARTIFICIAL SEQUENCE
  Synthetic Construct
RSKGQGK

SEQ ID NO: 16110 - protein, 7 aa, ARTIFICIAL SEQUENCE
  Synthetic Construct
RSKGQHK

SEQ ID NO: 16111 - protein, 7 aa, ARTIFICIAL SEQUENCE
  Synthetic Construct
RSKGQIK

SEQ ID NO: 16112 - protein, 7 aa, ARTIFICIAL SEQUENCE
  Synthetic Construct
RSKGQLK

SEQ ID NO: 16113 - protein, 7 aa, ARTIFICIAL SEQUENCE
  Synthetic Construct
RSKGQNK

SEQ ID NO: 16114 - protein, 7 aa, ARTIFICIAL SEQUENCE
  Synthetic Construct
RSKGQQK

SEQ ID NO: 16115 - protein, 7 aa, ARTIFICIAL SEQUENCE
  Synthetic Construct
RSKGQRK

SEQ ID NO: 16116 - protein, 7 aa, ARTIFICIAL SEQUENCE
  Synthetic Construct
RSKGQSK

SEQ ID NO: 16117 - protein, 7 aa, ARTIFICIAL SEQUENCE
  Synthetic Construct
RSKGQTK

SEQ ID NO: 16118 - protein, 7 aa, ARTIFICIAL SEQUENCE
  Synthetic Construct
RSKGQYK

SEQ ID NO: 16119 - protein, 7 aa, ARTIFICIAL SEQUENCE
  Synthetic Construct
RSKGRAK

SEQ ID NO: 16120 - protein, 7 aa, ARTIFICIAL SEQUENCE
  Synthetic Construct
RSKGRDK

SEQ ID NO: 16121 - protein, 7 aa, ARTIFICIAL SEQUENCE
  Synthetic Construct
RSKGREK

SEQ ID NO: 16122 - protein, 7 aa, ARTIFICIAL SEQUENCE
  Synthetic Construct
RSKGRFK

SEQ ID NO: 16123 - protein, 7 aa, ARTIFICIAL SEQUENCE
  Synthetic Construct
RSKGRGK

SEQ ID NO: 16124 - protein, 7 aa, ARTIFICIAL SEQUENCE
  Synthetic Construct
RSKGRHK

SEQ ID NO: 16125 - protein, 7 aa, ARTIFICIAL SEQUENCE
  Synthetic Construct
RSKGRIK

SEQ ID NO: 16126 - protein, 7 aa, ARTIFICIAL SEQUENCE
  Synthetic Construct
RSKGRLK

SEQ ID NO: 16127 - protein, 7 aa, ARTIFICIAL SEQUENCE
  Synthetic Construct
RSKGRNK

SEQ ID NO: 16128 - protein, 7 aa, ARTIFICIAL SEQUENCE
  Synthetic Construct
RSKGRQK

SEQ ID NO: 16129 - protein, 7 aa, ARTIFICIAL SEQUENCE
  Synthetic Construct
RSKGRRK

SEQ ID NO: 16130 - protein, 7 aa, ARTIFICIAL SEQUENCE
  Synthetic Construct
RSKGRSK

SEQ ID NO: 16131 - protein, 7 aa, ARTIFICIAL SEQUENCE
  Synthetic Construct
RSKGRTK

SEQ ID NO: 16132 - protein, 7 aa, ARTIFICIAL SEQUENCE
  Synthetic Construct
RSKGRYK

SEQ ID NO: 16133 - protein, 7 aa, ARTIFICIAL SEQUENCE
  Synthetic Construct
RSKGSAK

SEQ ID NO: 16134 - protein, 7 aa, ARTIFICIAL SEQUENCE
  Synthetic Construct
RSKGSDK

SEQ ID NO: 16135 - protein, 7 aa, ARTIFICIAL SEQUENCE
  Synthetic Construct
RSKGSEK

SEQ ID NO: 16136 - protein, 7 aa, ARTIFICIAL SEQUENCE
  Synthetic Construct
RSKGSFK

SEQ ID NO: 16137 - protein, 7 aa, ARTIFICIAL SEQUENCE
  Synthetic Construct
RSKGSGK

SEQ ID NO: 16138 - protein, 7 aa, ARTIFICIAL SEQUENCE
  Synthetic Construct
RSKGSHK

SEQ ID NO: 16139 - protein, 7 aa, ARTIFICIAL SEQUENCE
  Synthetic Construct
RSKGSIK

SEQ ID NO: 16140 - protein, 7 aa, ARTIFICIAL SEQUENCE
  Synthetic Construct
RSKGSLK

SEQ ID NO: 16141 - protein, 7 aa, ARTIFICIAL SEQUENCE
  Synthetic Construct
RSKGSNK

SEQ ID NO: 16142 - protein, 7 aa, ARTIFICIAL SEQUENCE
  Synthetic Construct
RSKGSQK

SEQ ID NO: 16143 - protein, 7 aa, ARTIFICIAL SEQUENCE
  Synthetic Construct
RSKGSRK

SEQ ID NO: 16144 - protein, 7 aa, ARTIFICIAL SEQUENCE
  Synthetic Construct
RSKGSSK

SEQ ID NO: 16145 - protein, 7 aa, ARTIFICIAL SEQUENCE
  Synthetic Construct
RSKGSTK

SEQ ID NO: 16146 - protein, 7 aa, ARTIFICIAL SEQUENCE
  Synthetic Construct
RSKGSYK

SEQ ID NO: 16147 - protein, 7 aa, ARTIFICIAL SEQUENCE
  Synthetic Construct
RSKGTAK

SEQ ID NO: 16148 - protein, 7 aa, ARTIFICIAL SEQUENCE
  Synthetic Construct
RSKGTDK

SEQ ID NO: 16149 - protein, 7 aa, ARTIFICIAL SEQUENCE
  Synthetic Construct
RSKGTEK

SEQ ID NO: 16150 - protein, 7 aa, ARTIFICIAL SEQUENCE
  Synthetic Construct
RSKGTFK

SEQ ID NO: 16151 - protein, 7 aa, ARTIFICIAL SEQUENCE
  Synthetic Construct
RSKGTGK

SEQ ID NO: 16152 - protein, 7 aa, ARTIFICIAL SEQUENCE
  Synthetic Construct
RSKGTHK

SEQ ID NO: 16153 - protein, 7 aa, ARTIFICIAL SEQUENCE
  Synthetic Construct
RSKGTIK

SEQ ID NO: 16154 - protein, 7 aa, ARTIFICIAL SEQUENCE
  Synthetic Construct
RSKGTLK

SEQ ID NO: 16155 - protein, 7 aa, ARTIFICIAL SEQUENCE
  Synthetic Construct
RSKGTNK

SEQ ID NO: 16156 - protein, 7 aa, ARTIFICIAL SEQUENCE
  Synthetic Construct
RSKGTQK

SEQ ID NO: 16157 - protein, 7 aa, ARTIFICIAL SEQUENCE
  Synthetic Construct
RSKGTRK

SEQ ID NO: 16158 - protein, 7 aa, ARTIFICIAL SEQUENCE
  Synthetic Construct
RSKGTSK

SEQ ID NO: 16159 - protein, 7 aa, ARTIFICIAL SEQUENCE
  Synthetic Construct
RSKGTTK

SEQ ID NO: 16160 - protein, 7 aa, ARTIFICIAL SEQUENCE
  Synthetic Construct
RSKGTYK

SEQ ID NO: 16161 - protein, 7 aa, ARTIFICIAL SEQUENCE
  Synthetic Construct
RSKGYAK

SEQ ID NO: 16162 - protein, 7 aa, ARTIFICIAL SEQUENCE
  Synthetic Construct
RSKGYDK

SEQ ID NO: 16163 - protein, 7 aa, ARTIFICIAL SEQUENCE
  Synthetic Construct
RSKGYEK

SEQ ID NO: 16164 - protein, 7 aa, ARTIFICIAL SEQUENCE
  Synthetic Construct
RSKGYFK

SEQ ID NO: 16165 - protein, 7 aa, ARTIFICIAL SEQUENCE
  Synthetic Construct
RSKGYGK

SEQ ID NO: 16166 - protein, 7 aa, ARTIFICIAL SEQUENCE
  Synthetic Construct
RSKGYHK

SEQ ID NO: 16167 - protein, 7 aa, ARTIFICIAL SEQUENCE
  Synthetic Construct
RSKGYIK

SEQ ID NO: 16168 - protein, 7 aa, ARTIFICIAL SEQUENCE
  Synthetic Construct
RSKGYLK

SEQ ID NO: 16169 - protein, 7 aa, ARTIFICIAL SEQUENCE
  Synthetic Construct
RSKGYNK

SEQ ID NO: 16170 - protein, 7 aa, ARTIFICIAL SEQUENCE
  Synthetic Construct
RSKGYQK

SEQ ID NO: 16171 - protein, 7 aa, ARTIFICIAL SEQUENCE
  Synthetic Construct
RSKGYRK

SEQ ID NO: 16172 - protein, 7 aa, ARTIFICIAL SEQUENCE
  Synthetic Construct
RSKGYSK

SEQ ID NO: 16173 - protein, 7 aa, ARTIFICIAL SEQUENCE
  Synthetic Construct
RSKGYTK

SEQ ID NO: 16174 - protein, 7 aa, ARTIFICIAL SEQUENCE
  Synthetic Construct
RSKGYYK

SEQ ID NO: 16175 - protein, 7 aa, ARTIFICIAL SEQUENCE
  Synthetic Construct
RSKHAAK

SEQ ID NO: 16176 - protein, 7 aa, ARTIFICIAL SEQUENCE
  Synthetic Construct
RSKHADK

SEQ ID NO: 16177 - protein, 7 aa, ARTIFICIAL SEQUENCE
  Synthetic Construct
RSKHAEK

SEQ ID NO: 16178 - protein, 7 aa, ARTIFICIAL SEQUENCE
  Synthetic Construct
RSKHAFK

SEQ ID NO: 16179 - protein, 7 aa, ARTIFICIAL SEQUENCE
  Synthetic Construct
RSKHAGK

SEQ ID NO: 16180 - protein, 7 aa, ARTIFICIAL SEQUENCE
  Synthetic Construct
RSKHAHK

SEQ ID NO: 16181 - protein, 7 aa, ARTIFICIAL SEQUENCE
  Synthetic Construct
RSKHAIK

SEQ ID NO: 16182 - protein, 7 aa, ARTIFICIAL SEQUENCE
  Synthetic Construct
RSKHALK

SEQ ID NO: 16183 - protein, 7 aa, ARTIFICIAL SEQUENCE
  Synthetic Construct
RSKHANK

SEQ ID NO: 16184 - protein, 7 aa, ARTIFICIAL SEQUENCE
  Synthetic Construct
RSKHAQK

SEQ ID NO: 16185 - protein, 7 aa, ARTIFICIAL SEQUENCE
  Synthetic Construct
RSKHARK

SEQ ID NO: 16186 - protein, 7 aa, ARTIFICIAL SEQUENCE
  Synthetic Construct
RSKHASK

SEQ ID NO: 16187 - protein, 7 aa, ARTIFICIAL SEQUENCE
  Synthetic Construct
RSKHATK

SEQ ID NO: 16188 - protein, 7 aa, ARTIFICIAL SEQUENCE
  Synthetic Construct
RSKHAYK

SEQ ID NO: 16189 - protein, 7 aa, ARTIFICIAL SEQUENCE
  Synthetic Construct
RSKHDAK

SEQ ID NO: 16190 - protein, 7 aa, ARTIFICIAL SEQUENCE
  Synthetic Construct
RSKHDDK

SEQ ID NO: 16191 - protein, 7 aa, ARTIFICIAL SEQUENCE
  Synthetic Construct
RSKHDEK

SEQ ID NO: 16192 - protein, 7 aa, ARTIFICIAL SEQUENCE
  Synthetic Construct
RSKHDFK

SEQ ID NO: 16193 - protein, 7 aa, ARTIFICIAL SEQUENCE
  Synthetic Construct
RSKHDGK

SEQ ID NO: 16194 - protein, 7 aa, ARTIFICIAL SEQUENCE
  Synthetic Construct
RSKHDHK

SEQ ID NO: 16195 - protein, 7 aa, ARTIFICIAL SEQUENCE
  Synthetic Construct
RSKHDIK

SEQ ID NO: 16196 - protein, 7 aa, ARTIFICIAL SEQUENCE
  Synthetic Construct
RSKHDLK

SEQ ID NO: 16197 - protein, 7 aa, ARTIFICIAL SEQUENCE
  Synthetic Construct
RSKHDNK

SEQ ID NO: 16198 - protein, 7 aa, ARTIFICIAL SEQUENCE
  Synthetic Construct
RSKHDQK

SEQ ID NO: 16199 - protein, 7 aa, ARTIFICIAL SEQUENCE
  Synthetic Construct
RSKHDRK

SEQ ID NO: 16200 - protein, 7 aa, ARTIFICIAL SEQUENCE
  Synthetic Construct
RSKHDSK

SEQ ID NO: 16201 - protein, 7 aa, ARTIFICIAL SEQUENCE
  Synthetic Construct
RSKHDTK

SEQ ID NO: 16202 - protein, 7 aa, ARTIFICIAL SEQUENCE
  Synthetic Construct
RSKHDYK

SEQ ID NO: 16203 - protein, 7 aa, ARTIFICIAL SEQUENCE
  Synthetic Construct
RSKHEAK

SEQ ID NO: 16204 - protein, 7 aa, ARTIFICIAL SEQUENCE
  Synthetic Construct
RSKHEDK

SEQ ID NO: 16205 - protein, 7 aa, ARTIFICIAL SEQUENCE
  Synthetic Construct
RSKHEEK

SEQ ID NO: 16206 - protein, 7 aa, ARTIFICIAL SEQUENCE
  Synthetic Construct
RSKHEFK

SEQ ID NO: 16207 - protein, 7 aa, ARTIFICIAL SEQUENCE
  Synthetic Construct
RSKHEGK

SEQ ID NO: 16208 - protein, 7 aa, ARTIFICIAL SEQUENCE
  Synthetic Construct
RSKHEHK

SEQ ID NO: 16209 - protein, 7 aa, ARTIFICIAL SEQUENCE
  Synthetic Construct
RSKHEIK

SEQ ID NO: 16210 - protein, 7 aa, ARTIFICIAL SEQUENCE
  Synthetic Construct
RSKHELK

SEQ ID NO: 16211 - protein, 7 aa, ARTIFICIAL SEQUENCE
  Synthetic Construct
RSKHENK

SEQ ID NO: 16212 - protein, 7 aa, ARTIFICIAL SEQUENCE
  Synthetic Construct
RSKHEQK

SEQ ID NO: 16213 - protein, 7 aa, ARTIFICIAL SEQUENCE
  Synthetic Construct
RSKHERK

SEQ ID NO: 16214 - protein, 7 aa, ARTIFICIAL SEQUENCE
  Synthetic Construct
RSKHESK

SEQ ID NO: 16215 - protein, 7 aa, ARTIFICIAL SEQUENCE
  Synthetic Construct
RSKHETK

SEQ ID NO: 16216 - protein, 7 aa, ARTIFICIAL SEQUENCE
  Synthetic Construct
RSKHEYK

SEQ ID NO: 16217 - protein, 7 aa, ARTIFICIAL SEQUENCE
  Synthetic Construct
RSKHFAK

SEQ ID NO: 16218 - protein, 7 aa, ARTIFICIAL SEQUENCE
  Synthetic Construct
RSKHFDK

SEQ ID NO: 16219 - protein, 7 aa, ARTIFICIAL SEQUENCE
  Synthetic Construct
RSKHFEK

SEQ ID NO: 16220 - protein, 7 aa, ARTIFICIAL SEQUENCE
  Synthetic Construct
RSKHFFK

SEQ ID NO: 16221 - protein, 7 aa, ARTIFICIAL SEQUENCE
  Synthetic Construct
RSKHFGK

SEQ ID NO: 16222 - protein, 7 aa, ARTIFICIAL SEQUENCE
  Synthetic Construct
RSKHFHK

SEQ ID NO: 16223 - protein, 7 aa, ARTIFICIAL SEQUENCE
  Synthetic Construct
RSKHFIK

SEQ ID NO: 16224 - protein, 7 aa, ARTIFICIAL SEQUENCE
  Synthetic Construct
RSKHFLK

SEQ ID NO: 16225 - protein, 7 aa, ARTIFICIAL SEQUENCE
  Synthetic Construct
RSKHFNK

SEQ ID NO: 16226 - protein, 7 aa, ARTIFICIAL SEQUENCE
  Synthetic Construct
RSKHFQK

SEQ ID NO: 16227 - protein, 7 aa, ARTIFICIAL SEQUENCE
  Synthetic Construct
RSKHFRK

SEQ ID NO: 16228 - protein, 7 aa, ARTIFICIAL SEQUENCE
  Synthetic Construct
RSKHFSK

SEQ ID NO: 16229 - protein, 7 aa, ARTIFICIAL SEQUENCE
  Synthetic Construct
RSKHFTK

SEQ ID NO: 16230 - protein, 7 aa, ARTIFICIAL SEQUENCE
  Synthetic Construct
RSKHFYK

SEQ ID NO: 16231 - protein, 7 aa, ARTIFICIAL SEQUENCE
  Synthetic Construct
RSKHGAK

SEQ ID NO: 16232 - protein, 7 aa, ARTIFICIAL SEQUENCE
  Synthetic Construct
RSKHGDK

SEQ ID NO: 16233 - protein, 7 aa, ARTIFICIAL SEQUENCE
  Synthetic Construct
RSKHGEK

SEQ ID NO: 16234 - protein, 7 aa, ARTIFICIAL SEQUENCE
  Synthetic Construct
RSKHGFK

SEQ ID NO: 16235 - protein, 7 aa, ARTIFICIAL SEQUENCE
  Synthetic Construct
RSKHGGK

SEQ ID NO: 16236 - protein, 7 aa, ARTIFICIAL SEQUENCE
  Synthetic Construct
RSKHGHK

SEQ ID NO: 16237 - protein, 7 aa, ARTIFICIAL SEQUENCE
  Synthetic Construct
RSKHGIK

SEQ ID NO: 16238 - protein, 7 aa, ARTIFICIAL SEQUENCE
  Synthetic Construct
RSKHGLK

SEQ ID NO: 16239 - protein, 7 aa, ARTIFICIAL SEQUENCE
  Synthetic Construct
RSKHGNK

SEQ ID NO: 16240 - protein, 7 aa, ARTIFICIAL SEQUENCE
  Synthetic Construct
RSKHGQK

SEQ ID NO: 16241 - protein, 7 aa, ARTIFICIAL SEQUENCE
  Synthetic Construct
RSKHGRK

SEQ ID NO: 16242 - protein, 7 aa, ARTIFICIAL SEQUENCE
  Synthetic Construct
RSKHGSK

SEQ ID NO: 16243 - protein, 7 aa, ARTIFICIAL SEQUENCE
  Synthetic Construct
RSKHGTK

SEQ ID NO: 16244 - protein, 7 aa, ARTIFICIAL SEQUENCE
  Synthetic Construct
RSKHGYK

SEQ ID NO: 16245 - protein, 7 aa, ARTIFICIAL SEQUENCE
  Synthetic Construct
RSKHHAK

SEQ ID NO: 16246 - protein, 7 aa, ARTIFICIAL SEQUENCE
  Synthetic Construct
RSKHHDK

SEQ ID NO: 16247 - protein, 7 aa, ARTIFICIAL SEQUENCE
  Synthetic Construct
RSKHHEK

SEQ ID NO: 16248 - protein, 7 aa, ARTIFICIAL SEQUENCE
  Synthetic Construct
RSKHHFK

SEQ ID NO: 16249 - protein, 7 aa, ARTIFICIAL SEQUENCE
  Synthetic Construct
RSKHHGK

SEQ ID NO: 16250 - protein, 7 aa, ARTIFICIAL SEQUENCE
  Synthetic Construct
RSKHHHK

SEQ ID NO: 16251 - protein, 7 aa, ARTIFICIAL SEQUENCE
  Synthetic Construct
RSKHHIK

SEQ ID NO: 16252 - protein, 7 aa, ARTIFICIAL SEQUENCE
  Synthetic Construct
RSKHHLK

SEQ ID NO: 16253 - protein, 7 aa, ARTIFICIAL SEQUENCE
  Synthetic Construct
RSKHHNK

SEQ ID NO: 16254 - protein, 7 aa, ARTIFICIAL SEQUENCE
  Synthetic Construct
RSKHHQK

SEQ ID NO: 16255 - protein, 7 aa, ARTIFICIAL SEQUENCE
  Synthetic Construct
RSKHHRK

SEQ ID NO: 16256 - protein, 7 aa, ARTIFICIAL SEQUENCE
  Synthetic Construct
RSKHHSK

SEQ ID NO: 16257 - protein, 7 aa, ARTIFICIAL SEQUENCE
  Synthetic Construct
RSKHHTK

SEQ ID NO: 16258 - protein, 7 aa, ARTIFICIAL SEQUENCE
  Synthetic Construct
RSKHHYK

SEQ ID NO: 16259 - protein, 7 aa, ARTIFICIAL SEQUENCE
  Synthetic Construct
RSKHIAK

SEQ ID NO: 16260 - protein, 7 aa, ARTIFICIAL SEQUENCE
  Synthetic Construct
RSKHIDK

SEQ ID NO: 16261 - protein, 7 aa, ARTIFICIAL SEQUENCE
  Synthetic Construct
RSKHIEK

SEQ ID NO: 16262 - protein, 7 aa, ARTIFICIAL SEQUENCE
  Synthetic Construct
RSKHIFK

SEQ ID NO: 16263 - protein, 7 aa, ARTIFICIAL SEQUENCE
  Synthetic Construct
RSKHIGK

SEQ ID NO: 16264 - protein, 7 aa, ARTIFICIAL SEQUENCE
  Synthetic Construct
RSKHIHK

SEQ ID NO: 16265 - protein, 7 aa, ARTIFICIAL SEQUENCE
  Synthetic Construct
RSKHIIK

SEQ ID NO: 16266 - protein, 7 aa, ARTIFICIAL SEQUENCE
  Synthetic Construct
RSKHILK

SEQ ID NO: 16267 - protein, 7 aa, ARTIFICIAL SEQUENCE
  Synthetic Construct
RSKHINK

SEQ ID NO: 16268 - protein, 7 aa, ARTIFICIAL SEQUENCE
  Synthetic Construct
RSKHIQK

SEQ ID NO: 16269 - protein, 7 aa, ARTIFICIAL SEQUENCE
  Synthetic Construct
RSKHIRK

SEQ ID NO: 16270 - protein, 7 aa, ARTIFICIAL SEQUENCE
  Synthetic Construct
RSKHISK

SEQ ID NO: 16271 - protein, 7 aa, ARTIFICIAL SEQUENCE
  Synthetic Construct
RSKHITK

SEQ ID NO: 16272 - protein, 7 aa, ARTIFICIAL SEQUENCE
  Synthetic Construct
RSKHIYK

SEQ ID NO: 16273 - protein, 7 aa, ARTIFICIAL SEQUENCE
  Synthetic Construct
RSKHLAK

SEQ ID NO: 16274 - protein, 7 aa, ARTIFICIAL SEQUENCE
  Synthetic Construct
RSKHLDK

SEQ ID NO: 16275 - protein, 7 aa, ARTIFICIAL SEQUENCE
  Synthetic Construct
RSKHLEK

SEQ ID NO: 16276 - protein, 7 aa, ARTIFICIAL SEQUENCE
  Synthetic Construct
RSKHLFK

SEQ ID NO: 16277 - protein, 7 aa, ARTIFICIAL SEQUENCE
  Synthetic Construct
RSKHLGK

SEQ ID NO: 16278 - protein, 7 aa, ARTIFICIAL SEQUENCE
  Synthetic Construct
RSKHLHK

SEQ ID NO: 16279 - protein, 7 aa, ARTIFICIAL SEQUENCE
  Synthetic Construct
RSKHLIK

SEQ ID NO: 16280 - protein, 7 aa, ARTIFICIAL SEQUENCE
  Synthetic Construct
RSKHLLK

SEQ ID NO: 16281 - protein, 7 aa, ARTIFICIAL SEQUENCE
  Synthetic Construct
RSKHLNK

SEQ ID NO: 16282 - protein, 7 aa, ARTIFICIAL SEQUENCE
  Synthetic Construct
RSKHLQK

SEQ ID NO: 16283 - protein, 7 aa, ARTIFICIAL SEQUENCE
  Synthetic Construct
RSKHLRK

SEQ ID NO: 16284 - protein, 7 aa, ARTIFICIAL SEQUENCE
  Synthetic Construct
RSKHLSK

SEQ ID NO: 16285 - protein, 7 aa, ARTIFICIAL SEQUENCE
  Synthetic Construct
RSKHLTK

SEQ ID NO: 16286 - protein, 7 aa, ARTIFICIAL SEQUENCE
  Synthetic Construct
RSKHLYK

SEQ ID NO: 16287 - protein, 7 aa, ARTIFICIAL SEQUENCE
  Synthetic Construct
RSKHNAK

SEQ ID NO: 16288 - protein, 7 aa, ARTIFICIAL SEQUENCE
  Synthetic Construct
RSKHNDK

SEQ ID NO: 16289 - protein, 7 aa, ARTIFICIAL SEQUENCE
  Synthetic Construct
RSKHNEK

SEQ ID NO: 16290 - protein, 7 aa, ARTIFICIAL SEQUENCE
  Synthetic Construct
RSKHNFK

SEQ ID NO: 16291 - protein, 7 aa, ARTIFICIAL SEQUENCE
  Synthetic Construct
RSKHNGK

SEQ ID NO: 16292 - protein, 7 aa, ARTIFICIAL SEQUENCE
  Synthetic Construct
RSKHNHK

SEQ ID NO: 16293 - protein, 7 aa, ARTIFICIAL SEQUENCE
  Synthetic Construct
RSKHNIK

SEQ ID NO: 16294 - protein, 7 aa, ARTIFICIAL SEQUENCE
  Synthetic Construct
RSKHNLK

SEQ ID NO: 16295 - protein, 7 aa, ARTIFICIAL SEQUENCE
  Synthetic Construct
RSKHNNK

SEQ ID NO: 16296 - protein, 7 aa, ARTIFICIAL SEQUENCE
  Synthetic Construct
RSKHNQK

SEQ ID NO: 16297 - protein, 7 aa, ARTIFICIAL SEQUENCE
  Synthetic Construct
RSKHNRK

SEQ ID NO: 16298 - protein, 7 aa, ARTIFICIAL SEQUENCE
  Synthetic Construct
RSKHNSK

SEQ ID NO: 16299 - protein, 7 aa, ARTIFICIAL SEQUENCE
  Synthetic Construct
RSKHNTK

SEQ ID NO: 16300 - protein, 7 aa, ARTIFICIAL SEQUENCE
  Synthetic Construct
RSKHNYK

SEQ ID NO: 16301 - protein, 7 aa, ARTIFICIAL SEQUENCE
  Synthetic Construct
RSKHQAK

SEQ ID NO: 16302 - protein, 7 aa, ARTIFICIAL SEQUENCE
  Synthetic Construct
RSKHQDK

SEQ ID NO: 16303 - protein, 7 aa, ARTIFICIAL SEQUENCE
  Synthetic Construct
RSKHQEK

SEQ ID NO: 16304 - protein, 7 aa, ARTIFICIAL SEQUENCE
  Synthetic Construct
RSKHQFK

SEQ ID NO: 16305 - protein, 7 aa, ARTIFICIAL SEQUENCE
  Synthetic Construct
RSKHQGK

SEQ ID NO: 16306 - protein, 7 aa, ARTIFICIAL SEQUENCE
  Synthetic Construct
RSKHQHK

SEQ ID NO: 16307 - protein, 7 aa, ARTIFICIAL SEQUENCE
  Synthetic Construct
RSKHQIK

SEQ ID NO: 16308 - protein, 7 aa, ARTIFICIAL SEQUENCE
  Synthetic Construct
RSKHQLK

SEQ ID NO: 16309 - protein, 7 aa, ARTIFICIAL SEQUENCE
  Synthetic Construct
RSKHQNK

SEQ ID NO: 16310 - protein, 7 aa, ARTIFICIAL SEQUENCE
  Synthetic Construct
RSKHQQK

SEQ ID NO: 16311 - protein, 7 aa, ARTIFICIAL SEQUENCE
  Synthetic Construct
RSKHQRK

SEQ ID NO: 16312 - protein, 7 aa, ARTIFICIAL SEQUENCE
  Synthetic Construct
RSKHQSK

SEQ ID NO: 16313 - protein, 7 aa, ARTIFICIAL SEQUENCE
  Synthetic Construct
RSKHQTK

SEQ ID NO: 16314 - protein, 7 aa, ARTIFICIAL SEQUENCE
  Synthetic Construct
RSKHQYK

SEQ ID NO: 16315 - protein, 7 aa, ARTIFICIAL SEQUENCE
  Synthetic Construct
RSKHRAK

SEQ ID NO: 16316 - protein, 7 aa, ARTIFICIAL SEQUENCE
  Synthetic Construct
RSKHRDK

SEQ ID NO: 16317 - protein, 7 aa, ARTIFICIAL SEQUENCE
  Synthetic Construct
RSKHREK

SEQ ID NO: 16318 - protein, 7 aa, ARTIFICIAL SEQUENCE
  Synthetic Construct
RSKHRFK

SEQ ID NO: 16319 - protein, 7 aa, ARTIFICIAL SEQUENCE
  Synthetic Construct
RSKHRGK

SEQ ID NO: 16320 - protein, 7 aa, ARTIFICIAL SEQUENCE
  Synthetic Construct
RSKHRHK

SEQ ID NO: 16321 - protein, 7 aa, ARTIFICIAL SEQUENCE
  Synthetic Construct
RSKHRIK

SEQ ID NO: 16322 - protein, 7 aa, ARTIFICIAL SEQUENCE
  Synthetic Construct
RSKHRLK

SEQ ID NO: 16323 - protein, 7 aa, ARTIFICIAL SEQUENCE
  Synthetic Construct
RSKHRNK

SEQ ID NO: 16324 - protein, 7 aa, ARTIFICIAL SEQUENCE
  Synthetic Construct
RSKHRQK

SEQ ID NO: 16325 - protein, 7 aa, ARTIFICIAL SEQUENCE
  Synthetic Construct
RSKHRRK

SEQ ID NO: 16326 - protein, 7 aa, ARTIFICIAL SEQUENCE
  Synthetic Construct
RSKHRSK

SEQ ID NO: 16327 - protein, 7 aa, ARTIFICIAL SEQUENCE
  Synthetic Construct
RSKHRTK

SEQ ID NO: 16328 - protein, 7 aa, ARTIFICIAL SEQUENCE
  Synthetic Construct
RSKHRYK

SEQ ID NO: 16329 - protein, 7 aa, ARTIFICIAL SEQUENCE
  Synthetic Construct
RSKHSAK

SEQ ID NO: 16330 - protein, 7 aa, ARTIFICIAL SEQUENCE
  Synthetic Construct
RSKHSDK

SEQ ID NO: 16331 - protein, 7 aa, ARTIFICIAL SEQUENCE
  Synthetic Construct
RSKHSEK

SEQ ID NO: 16332 - protein, 7 aa, ARTIFICIAL SEQUENCE
  Synthetic Construct
RSKHSFK

SEQ ID NO: 16333 - protein, 7 aa, ARTIFICIAL SEQUENCE
  Synthetic Construct
RSKHSGK

SEQ ID NO: 16334 - protein, 7 aa, ARTIFICIAL SEQUENCE
  Synthetic Construct
RSKHSHK

SEQ ID NO: 16335 - protein, 7 aa, ARTIFICIAL SEQUENCE
  Synthetic Construct
RSKHSIK

SEQ ID NO: 16336 - protein, 7 aa, ARTIFICIAL SEQUENCE
  Synthetic Construct
RSKHSLK

SEQ ID NO: 16337 - protein, 7 aa, ARTIFICIAL SEQUENCE
  Synthetic Construct
RSKHSNK

SEQ ID NO: 16338 - protein, 7 aa, ARTIFICIAL SEQUENCE
  Synthetic Construct
RSKHSQK

SEQ ID NO: 16339 - protein, 7 aa, ARTIFICIAL SEQUENCE
  Synthetic Construct
RSKHSRK

SEQ ID NO: 16340 - protein, 7 aa, ARTIFICIAL SEQUENCE
  Synthetic Construct
RSKHSSK

SEQ ID NO: 16341 - protein, 7 aa, ARTIFICIAL SEQUENCE
  Synthetic Construct
RSKHSTK

SEQ ID NO: 16342 - protein, 7 aa, ARTIFICIAL SEQUENCE
  Synthetic Construct
RSKHSYK

SEQ ID NO: 16343 - protein, 7 aa, ARTIFICIAL SEQUENCE
  Synthetic Construct
RSKHTAK

SEQ ID NO: 16344 - protein, 7 aa, ARTIFICIAL SEQUENCE
  Synthetic Construct
RSKHTDK

SEQ ID NO: 16345 - protein, 7 aa, ARTIFICIAL SEQUENCE
  Synthetic Construct
RSKHTEK

SEQ ID NO: 16346 - protein, 7 aa, ARTIFICIAL SEQUENCE
  Synthetic Construct
RSKHTFK

SEQ ID NO: 16347 - protein, 7 aa, ARTIFICIAL SEQUENCE
  Synthetic Construct
RSKHTGK

SEQ ID NO: 16348 - protein, 7 aa, ARTIFICIAL SEQUENCE
  Synthetic Construct
RSKHTHK

SEQ ID NO: 16349 - protein, 7 aa, ARTIFICIAL SEQUENCE
  Synthetic Construct
RSKHTIK

SEQ ID NO: 16350 - protein, 7 aa, ARTIFICIAL SEQUENCE
  Synthetic Construct
RSKHTLK

SEQ ID NO: 16351 - protein, 7 aa, ARTIFICIAL SEQUENCE
  Synthetic Construct
RSKHTNK

SEQ ID NO: 16352 - protein, 7 aa, ARTIFICIAL SEQUENCE
  Synthetic Construct
RSKHTQK

SEQ ID NO: 16353 - protein, 7 aa, ARTIFICIAL SEQUENCE
  Synthetic Construct
RSKHTRK

SEQ ID NO: 16354 - protein, 7 aa, ARTIFICIAL SEQUENCE
  Synthetic Construct
RSKHTSK

SEQ ID NO: 16355 - protein, 7 aa, ARTIFICIAL SEQUENCE
  Synthetic Construct
RSKHTTK

SEQ ID NO: 16356 - protein, 7 aa, ARTIFICIAL SEQUENCE
  Synthetic Construct
RSKHTYK

SEQ ID NO: 16357 - protein, 7 aa, ARTIFICIAL SEQUENCE
  Synthetic Construct
RSKHYAK

SEQ ID NO: 16358 - protein, 7 aa, ARTIFICIAL SEQUENCE
  Synthetic Construct
RSKHYDK

SEQ ID NO: 16359 - protein, 7 aa, ARTIFICIAL SEQUENCE
  Synthetic Construct
RSKHYEK

SEQ ID NO: 16360 - protein, 7 aa, ARTIFICIAL SEQUENCE
  Synthetic Construct
RSKHYFK

SEQ ID NO: 16361 - protein, 7 aa, ARTIFICIAL SEQUENCE
  Synthetic Construct
RSKHYGK

SEQ ID NO: 16362 - protein, 7 aa, ARTIFICIAL SEQUENCE
  Synthetic Construct
RSKHYHK

SEQ ID NO: 16363 - protein, 7 aa, ARTIFICIAL SEQUENCE
  Synthetic Construct
RSKHYIK

SEQ ID NO: 16364 - protein, 7 aa, ARTIFICIAL SEQUENCE
  Synthetic Construct
RSKHYLK

SEQ ID NO: 16365 - protein, 7 aa, ARTIFICIAL SEQUENCE
  Synthetic Construct
RSKHYNK

SEQ ID NO: 16366 - protein, 7 aa, ARTIFICIAL SEQUENCE
  Synthetic Construct
RSKHYQK

SEQ ID NO: 16367 - protein, 7 aa, ARTIFICIAL SEQUENCE
  Synthetic Construct
RSKHYRK

SEQ ID NO: 16368 - protein, 7 aa, ARTIFICIAL SEQUENCE
  Synthetic Construct
RSKHYSK

SEQ ID NO: 16369 - protein, 7 aa, ARTIFICIAL SEQUENCE
  Synthetic Construct
RSKHYTK

SEQ ID NO: 16370 - protein, 7 aa, ARTIFICIAL SEQUENCE
  Synthetic Construct
RSKHYYK

SEQ ID NO: 16371 - protein, 7 aa, ARTIFICIAL SEQUENCE
  Synthetic Construct
RSKIAAK

SEQ ID NO: 16372 - protein, 7 aa, ARTIFICIAL SEQUENCE
  Synthetic Construct
RSKIADK

SEQ ID NO: 16373 - protein, 7 aa, ARTIFICIAL SEQUENCE
  Synthetic Construct
RSKIAEK

SEQ ID NO: 16374 - protein, 7 aa, ARTIFICIAL SEQUENCE
  Synthetic Construct
RSKIAFK

SEQ ID NO: 16375 - protein, 7 aa, ARTIFICIAL SEQUENCE
  Synthetic Construct
RSKIAGK

SEQ ID NO: 16376 - protein, 7 aa, ARTIFICIAL SEQUENCE
  Synthetic Construct
RSKIAHK

SEQ ID NO: 16377 - protein, 7 aa, ARTIFICIAL SEQUENCE
  Synthetic Construct
RSKIAIK

SEQ ID NO: 16378 - protein, 7 aa, ARTIFICIAL SEQUENCE
  Synthetic Construct
RSKIALK

SEQ ID NO: 16379 - protein, 7 aa, ARTIFICIAL SEQUENCE
  Synthetic Construct
RSKIANK

SEQ ID NO: 16380 - protein, 7 aa, ARTIFICIAL SEQUENCE
  Synthetic Construct
RSKIAQK

SEQ ID NO: 16381 - protein, 7 aa, ARTIFICIAL SEQUENCE
  Synthetic Construct
RSKIARK

SEQ ID NO: 16382 - protein, 7 aa, ARTIFICIAL SEQUENCE
  Synthetic Construct
RSKIASK

SEQ ID NO: 16383 - protein, 7 aa, ARTIFICIAL SEQUENCE
  Synthetic Construct
RSKIATK

SEQ ID NO: 16384 - protein, 7 aa, ARTIFICIAL SEQUENCE
  Synthetic Construct
RSKIAYK

SEQ ID NO: 16385 - protein, 7 aa, ARTIFICIAL SEQUENCE
  Synthetic Construct
RSKIDAK

SEQ ID NO: 16386 - protein, 7 aa, ARTIFICIAL SEQUENCE
  Synthetic Construct
RSKIDDK

SEQ ID NO: 16387 - protein, 7 aa, ARTIFICIAL SEQUENCE
  Synthetic Construct
RSKIDEK

SEQ ID NO: 16388 - protein, 7 aa, ARTIFICIAL SEQUENCE
  Synthetic Construct
RSKIDFK

SEQ ID NO: 16389 - protein, 7 aa, ARTIFICIAL SEQUENCE
  Synthetic Construct
RSKIDGK

SEQ ID NO: 16390 - protein, 7 aa, ARTIFICIAL SEQUENCE
  Synthetic Construct
RSKIDHK

SEQ ID NO: 16391 - protein, 7 aa, ARTIFICIAL SEQUENCE
  Synthetic Construct
RSKIDIK

SEQ ID NO: 16392 - protein, 7 aa, ARTIFICIAL SEQUENCE
  Synthetic Construct
RSKIDLK

SEQ ID NO: 16393 - protein, 7 aa, ARTIFICIAL SEQUENCE
  Synthetic Construct
RSKIDNK

SEQ ID NO: 16394 - protein, 7 aa, ARTIFICIAL SEQUENCE
  Synthetic Construct
RSKIDQK

SEQ ID NO: 16395 - protein, 7 aa, ARTIFICIAL SEQUENCE
  Synthetic Construct
RSKIDRK

SEQ ID NO: 16396 - protein, 7 aa, ARTIFICIAL SEQUENCE
  Synthetic Construct
RSKIDSK

SEQ ID NO: 16397 - protein, 7 aa, ARTIFICIAL SEQUENCE
  Synthetic Construct
RSKIDTK

SEQ ID NO: 16398 - protein, 7 aa, ARTIFICIAL SEQUENCE
  Synthetic Construct
RSKIDYK

SEQ ID NO: 16399 - protein, 7 aa, ARTIFICIAL SEQUENCE
  Synthetic Construct
RSKIEAK

SEQ ID NO: 16400 - protein, 7 aa, ARTIFICIAL SEQUENCE
  Synthetic Construct
RSKIEDK

SEQ ID NO: 16401 - protein, 7 aa, ARTIFICIAL SEQUENCE
  Synthetic Construct
RSKIEEK

SEQ ID NO: 16402 - protein, 7 aa, ARTIFICIAL SEQUENCE
  Synthetic Construct
RSKIEFK

SEQ ID NO: 16403 - protein, 7 aa, ARTIFICIAL SEQUENCE
  Synthetic Construct
RSKIEGK

SEQ ID NO: 16404 - protein, 7 aa, ARTIFICIAL SEQUENCE
  Synthetic Construct
RSKIEHK

SEQ ID NO: 16405 - protein, 7 aa, ARTIFICIAL SEQUENCE
  Synthetic Construct
RSKIEIK

SEQ ID NO: 16406 - protein, 7 aa, ARTIFICIAL SEQUENCE
  Synthetic Construct
RSKIELK

SEQ ID NO: 16407 - protein, 7 aa, ARTIFICIAL SEQUENCE
  Synthetic Construct
RSKIENK

SEQ ID NO: 16408 - protein, 7 aa, ARTIFICIAL SEQUENCE
  Synthetic Construct
RSKIEQK

SEQ ID NO: 16409 - protein, 7 aa, ARTIFICIAL SEQUENCE
  Synthetic Construct
RSKIERK

SEQ ID NO: 16410 - protein, 7 aa, ARTIFICIAL SEQUENCE
  Synthetic Construct
RSKIESK

SEQ ID NO: 16411 - protein, 7 aa, ARTIFICIAL SEQUENCE
  Synthetic Construct
RSKIETK

SEQ ID NO: 16412 - protein, 7 aa, ARTIFICIAL SEQUENCE
  Synthetic Construct
RSKIEYK

SEQ ID NO: 16413 - protein, 7 aa, ARTIFICIAL SEQUENCE
  Synthetic Construct
RSKIFAK

SEQ ID NO: 16414 - protein, 7 aa, ARTIFICIAL SEQUENCE
  Synthetic Construct
RSKIFDK

SEQ ID NO: 16415 - protein, 7 aa, ARTIFICIAL SEQUENCE
  Synthetic Construct
RSKIFEK

SEQ ID NO: 16416 - protein, 7 aa, ARTIFICIAL SEQUENCE
  Synthetic Construct
RSKIFFK

SEQ ID NO: 16417 - protein, 7 aa, ARTIFICIAL SEQUENCE
  Synthetic Construct
RSKIFGK

SEQ ID NO: 16418 - protein, 7 aa, ARTIFICIAL SEQUENCE
  Synthetic Construct
RSKIFHK

SEQ ID NO: 16419 - protein, 7 aa, ARTIFICIAL SEQUENCE
  Synthetic Construct
RSKIFIK

SEQ ID NO: 16420 - protein, 7 aa, ARTIFICIAL SEQUENCE
  Synthetic Construct
RSKIFLK

SEQ ID NO: 16421 - protein, 7 aa, ARTIFICIAL SEQUENCE
  Synthetic Construct
RSKIFNK

SEQ ID NO: 16422 - protein, 7 aa, ARTIFICIAL SEQUENCE
  Synthetic Construct
RSKIFQK

SEQ ID NO: 16423 - protein, 7 aa, ARTIFICIAL SEQUENCE
  Synthetic Construct
RSKIFRK

SEQ ID NO: 16424 - protein, 7 aa, ARTIFICIAL SEQUENCE
  Synthetic Construct
RSKIFSK

SEQ ID NO: 16425 - protein, 7 aa, ARTIFICIAL SEQUENCE
  Synthetic Construct
RSKIFTK

SEQ ID NO: 16426 - protein, 7 aa, ARTIFICIAL SEQUENCE
  Synthetic Construct
RSKIFYK

SEQ ID NO: 16427 - protein, 7 aa, ARTIFICIAL SEQUENCE
  Synthetic Construct
RSKIGAK

SEQ ID NO: 16428 - protein, 7 aa, ARTIFICIAL SEQUENCE
  Synthetic Construct
RSKIGDK

SEQ ID NO: 16429 - protein, 7 aa, ARTIFICIAL SEQUENCE
  Synthetic Construct
RSKIGEK

SEQ ID NO: 16430 - protein, 7 aa, ARTIFICIAL SEQUENCE
  Synthetic Construct
RSKIGFK

SEQ ID NO: 16431 - protein, 7 aa, ARTIFICIAL SEQUENCE
  Synthetic Construct
RSKIGGK

SEQ ID NO: 16432 - protein, 7 aa, ARTIFICIAL SEQUENCE
  Synthetic Construct
RSKIGHK

SEQ ID NO: 16433 - protein, 7 aa, ARTIFICIAL SEQUENCE
  Synthetic Construct
RSKIGIK

SEQ ID NO: 16434 - protein, 7 aa, ARTIFICIAL SEQUENCE
  Synthetic Construct
RSKIGLK

SEQ ID NO: 16435 - protein, 7 aa, ARTIFICIAL SEQUENCE
  Synthetic Construct
RSKIGNK

SEQ ID NO: 16436 - protein, 7 aa, ARTIFICIAL SEQUENCE
  Synthetic Construct
RSKIGQK

SEQ ID NO: 16437 - protein, 7 aa, ARTIFICIAL SEQUENCE
  Synthetic Construct
RSKIGRK

SEQ ID NO: 16438 - protein, 7 aa, ARTIFICIAL SEQUENCE
  Synthetic Construct
RSKIGSK

SEQ ID NO: 16439 - protein, 7 aa, ARTIFICIAL SEQUENCE
  Synthetic Construct
RSKIGTK

SEQ ID NO: 16440 - protein, 7 aa, ARTIFICIAL SEQUENCE
  Synthetic Construct
RSKIGYK

SEQ ID NO: 16441 - protein, 7 aa, ARTIFICIAL SEQUENCE
  Synthetic Construct
RSKIHAK

SEQ ID NO: 16442 - protein, 7 aa, ARTIFICIAL SEQUENCE
  Synthetic Construct
RSKIHDK

SEQ ID NO: 16443 - protein, 7 aa, ARTIFICIAL SEQUENCE
  Synthetic Construct
RSKIHEK

SEQ ID NO: 16444 - protein, 7 aa, ARTIFICIAL SEQUENCE
  Synthetic Construct
RSKIHFK

SEQ ID NO: 16445 - protein, 7 aa, ARTIFICIAL SEQUENCE
  Synthetic Construct
RSKIHGK

SEQ ID NO: 16446 - protein, 7 aa, ARTIFICIAL SEQUENCE
  Synthetic Construct
RSKIHHK

SEQ ID NO: 16447 - protein, 7 aa, ARTIFICIAL SEQUENCE
  Synthetic Construct
RSKIHIK

SEQ ID NO: 16448 - protein, 7 aa, ARTIFICIAL SEQUENCE
  Synthetic Construct
RSKIHLK

SEQ ID NO: 16449 - protein, 7 aa, ARTIFICIAL SEQUENCE
  Synthetic Construct
RSKIHNK

SEQ ID NO: 16450 - protein, 7 aa, ARTIFICIAL SEQUENCE
  Synthetic Construct
RSKIHQK

SEQ ID NO: 16451 - protein, 7 aa, ARTIFICIAL SEQUENCE
  Synthetic Construct
RSKIHRK

SEQ ID NO: 16452 - protein, 7 aa, ARTIFICIAL SEQUENCE
  Synthetic Construct
RSKIHSK

SEQ ID NO: 16453 - protein, 7 aa, ARTIFICIAL SEQUENCE
  Synthetic Construct
RSKIHTK

SEQ ID NO: 16454 - protein, 7 aa, ARTIFICIAL SEQUENCE
  Synthetic Construct
RSKIHYK

SEQ ID NO: 16455 - protein, 7 aa, ARTIFICIAL SEQUENCE
  Synthetic Construct
RSKIIAK

SEQ ID NO: 16456 - protein, 7 aa, ARTIFICIAL SEQUENCE
  Synthetic Construct
RSKIIDK

SEQ ID NO: 16457 - protein, 7 aa, ARTIFICIAL SEQUENCE
  Synthetic Construct
RSKIIEK

SEQ ID NO: 16458 - protein, 7 aa, ARTIFICIAL SEQUENCE
  Synthetic Construct
RSKIIFK

SEQ ID NO: 16459 - protein, 7 aa, ARTIFICIAL SEQUENCE
  Synthetic Construct
RSKIIGK

SEQ ID NO: 16460 - protein, 7 aa, ARTIFICIAL SEQUENCE
  Synthetic Construct
RSKIIHK

SEQ ID NO: 16461 - protein, 7 aa, ARTIFICIAL SEQUENCE
  Synthetic Construct
RSKIIIK

SEQ ID NO: 16462 - protein, 7 aa, ARTIFICIAL SEQUENCE
  Synthetic Construct
RSKIILK

SEQ ID NO: 16463 - protein, 7 aa, ARTIFICIAL SEQUENCE
  Synthetic Construct
RSKIINK

SEQ ID NO: 16464 - protein, 7 aa, ARTIFICIAL SEQUENCE
  Synthetic Construct
RSKIIQK

SEQ ID NO: 16465 - protein, 7 aa, ARTIFICIAL SEQUENCE
  Synthetic Construct
RSKIIRK

SEQ ID NO: 16466 - protein, 7 aa, ARTIFICIAL SEQUENCE
  Synthetic Construct
RSKIISK

SEQ ID NO: 16467 - protein, 7 aa, ARTIFICIAL SEQUENCE
  Synthetic Construct
RSKIITK

SEQ ID NO: 16468 - protein, 7 aa, ARTIFICIAL SEQUENCE
  Synthetic Construct
RSKIIYK

SEQ ID NO: 16469 - protein, 7 aa, ARTIFICIAL SEQUENCE
  Synthetic Construct
RSKILAK

SEQ ID NO: 16470 - protein, 7 aa, ARTIFICIAL SEQUENCE
  Synthetic Construct
RSKILDK

SEQ ID NO: 16471 - protein, 7 aa, ARTIFICIAL SEQUENCE
  Synthetic Construct
RSKILEK

SEQ ID NO: 16472 - protein, 7 aa, ARTIFICIAL SEQUENCE
  Synthetic Construct
RSKILFK

SEQ ID NO: 16473 - protein, 7 aa, ARTIFICIAL SEQUENCE
  Synthetic Construct
RSKILGK

SEQ ID NO: 16474 - protein, 7 aa, ARTIFICIAL SEQUENCE
  Synthetic Construct
RSKILHK

SEQ ID NO: 16475 - protein, 7 aa, ARTIFICIAL SEQUENCE
  Synthetic Construct
RSKILIK

SEQ ID NO: 16476 - protein, 7 aa, ARTIFICIAL SEQUENCE
  Synthetic Construct
RSKILLK

SEQ ID NO: 16477 - protein, 7 aa, ARTIFICIAL SEQUENCE
  Synthetic Construct
RSKILNK

SEQ ID NO: 16478 - protein, 7 aa, ARTIFICIAL SEQUENCE
  Synthetic Construct
RSKILQK

SEQ ID NO: 16479 - protein, 7 aa, ARTIFICIAL SEQUENCE
  Synthetic Construct
RSKILRK

SEQ ID NO: 16480 - protein, 7 aa, ARTIFICIAL SEQUENCE
  Synthetic Construct
RSKILSK

SEQ ID NO: 16481 - protein, 7 aa, ARTIFICIAL SEQUENCE
  Synthetic Construct
RSKILTK

SEQ ID NO: 16482 - protein, 7 aa, ARTIFICIAL SEQUENCE
  Synthetic Construct
RSKILYK

SEQ ID NO: 16483 - protein, 7 aa, ARTIFICIAL SEQUENCE
  Synthetic Construct
RSKINAK

SEQ ID NO: 16484 - protein, 7 aa, ARTIFICIAL SEQUENCE
  Synthetic Construct
RSKINDK

SEQ ID NO: 16485 - protein, 7 aa, ARTIFICIAL SEQUENCE
  Synthetic Construct
RSKINEK

SEQ ID NO: 16486 - protein, 7 aa, ARTIFICIAL SEQUENCE
  Synthetic Construct
RSKINFK

SEQ ID NO: 16487 - protein, 7 aa, ARTIFICIAL SEQUENCE
  Synthetic Construct
RSKINGK

SEQ ID NO: 16488 - protein, 7 aa, ARTIFICIAL SEQUENCE
  Synthetic Construct
RSKINHK

SEQ ID NO: 16489 - protein, 7 aa, ARTIFICIAL SEQUENCE
  Synthetic Construct
RSKINIK

SEQ ID NO: 16490 - protein, 7 aa, ARTIFICIAL SEQUENCE
  Synthetic Construct
RSKINLK

SEQ ID NO: 16491 - protein, 7 aa, ARTIFICIAL SEQUENCE
  Synthetic Construct
RSKINNK

SEQ ID NO: 16492 - protein, 7 aa, ARTIFICIAL SEQUENCE
  Synthetic Construct
RSKINQK

SEQ ID NO: 16493 - protein, 7 aa, ARTIFICIAL SEQUENCE
  Synthetic Construct
RSKINRK

SEQ ID NO: 16494 - protein, 7 aa, ARTIFICIAL SEQUENCE
  Synthetic Construct
RSKINSK

SEQ ID NO: 16495 - protein, 7 aa, ARTIFICIAL SEQUENCE
  Synthetic Construct
RSKINTK

SEQ ID NO: 16496 - protein, 7 aa, ARTIFICIAL SEQUENCE
  Synthetic Construct
RSKINYK

SEQ ID NO: 16497 - protein, 7 aa, ARTIFICIAL SEQUENCE
  Synthetic Construct
RSKIQAK

SEQ ID NO: 16498 - protein, 7 aa, ARTIFICIAL SEQUENCE
  Synthetic Construct
RSKIQDK

SEQ ID NO: 16499 - protein, 7 aa, ARTIFICIAL SEQUENCE
  Synthetic Construct
RSKIQEK

SEQ ID NO: 16500 - protein, 7 aa, ARTIFICIAL SEQUENCE
  Synthetic Construct
RSKIQFK

SEQ ID NO: 16501 - protein, 7 aa, ARTIFICIAL SEQUENCE
  Synthetic Construct
RSKIQGK

SEQ ID NO: 16502 - protein, 7 aa, ARTIFICIAL SEQUENCE
  Synthetic Construct
RSKIQHK

SEQ ID NO: 16503 - protein, 7 aa, ARTIFICIAL SEQUENCE
  Synthetic Construct
RSKIQIK

SEQ ID NO: 16504 - protein, 7 aa, ARTIFICIAL SEQUENCE
  Synthetic Construct
RSKIQLK

SEQ ID NO: 16505 - protein, 7 aa, ARTIFICIAL SEQUENCE
  Synthetic Construct
RSKIQNK

SEQ ID NO: 16506 - protein, 7 aa, ARTIFICIAL SEQUENCE
  Synthetic Construct
RSKIQQK

SEQ ID NO: 16507 - protein, 7 aa, ARTIFICIAL SEQUENCE
  Synthetic Construct
RSKIQRK

SEQ ID NO: 16508 - protein, 7 aa, ARTIFICIAL SEQUENCE
  Synthetic Construct
RSKIQSK

SEQ ID NO: 16509 - protein, 7 aa, ARTIFICIAL SEQUENCE
  Synthetic Construct
RSKIQTK

SEQ ID NO: 16510 - protein, 7 aa, ARTIFICIAL SEQUENCE
  Synthetic Construct
RSKIQYK

SEQ ID NO: 16511 - protein, 7 aa, ARTIFICIAL SEQUENCE
  Synthetic Construct
RSKIRAK

SEQ ID NO: 16512 - protein, 7 aa, ARTIFICIAL SEQUENCE
  Synthetic Construct
RSKIRDK

SEQ ID NO: 16513 - protein, 7 aa, ARTIFICIAL SEQUENCE
  Synthetic Construct
RSKIREK

SEQ ID NO: 16514 - protein, 7 aa, ARTIFICIAL SEQUENCE
  Synthetic Construct
RSKIRFK

SEQ ID NO: 16515 - protein, 7 aa, ARTIFICIAL SEQUENCE
  Synthetic Construct
RSKIRGK

SEQ ID NO: 16516 - protein, 7 aa, ARTIFICIAL SEQUENCE
  Synthetic Construct
RSKIRHK

SEQ ID NO: 16517 - protein, 7 aa, ARTIFICIAL SEQUENCE
  Synthetic Construct
RSKIRIK

SEQ ID NO: 16518 - protein, 7 aa, ARTIFICIAL SEQUENCE
  Synthetic Construct
RSKIRLK

SEQ ID NO: 16519 - protein, 7 aa, ARTIFICIAL SEQUENCE
  Synthetic Construct
RSKIRNK

SEQ ID NO: 16520 - protein, 7 aa, ARTIFICIAL SEQUENCE
  Synthetic Construct
RSKIRQK

SEQ ID NO: 16521 - protein, 7 aa, ARTIFICIAL SEQUENCE
  Synthetic Construct
RSKIRRK

SEQ ID NO: 16522 - protein, 7 aa, ARTIFICIAL SEQUENCE
  Synthetic Construct
RSKIRSK

SEQ ID NO: 16523 - protein, 7 aa, ARTIFICIAL SEQUENCE
  Synthetic Construct
RSKIRTK

SEQ ID NO: 16524 - protein, 7 aa, ARTIFICIAL SEQUENCE
  Synthetic Construct
RSKIRYK

SEQ ID NO: 16525 - protein, 7 aa, ARTIFICIAL SEQUENCE
  Synthetic Construct
RSKISAK

SEQ ID NO: 16526 - protein, 7 aa, ARTIFICIAL SEQUENCE
  Synthetic Construct
RSKISDK

SEQ ID NO: 16527 - protein, 7 aa, ARTIFICIAL SEQUENCE
  Synthetic Construct
RSKISEK

SEQ ID NO: 16528 - protein, 7 aa, ARTIFICIAL SEQUENCE
  Synthetic Construct
RSKISFK

SEQ ID NO: 16529 - protein, 7 aa, ARTIFICIAL SEQUENCE
  Synthetic Construct
RSKISGK

SEQ ID NO: 16530 - protein, 7 aa, ARTIFICIAL SEQUENCE
  Synthetic Construct
RSKISHK

SEQ ID NO: 16531 - protein, 7 aa, ARTIFICIAL SEQUENCE
  Synthetic Construct
RSKISIK

SEQ ID NO: 16532 - protein, 7 aa, ARTIFICIAL SEQUENCE
  Synthetic Construct
RSKISLK

SEQ ID NO: 16533 - protein, 7 aa, ARTIFICIAL SEQUENCE
  Synthetic Construct
RSKISNK

SEQ ID NO: 16534 - protein, 7 aa, ARTIFICIAL SEQUENCE
  Synthetic Construct
RSKISQK

SEQ ID NO: 16535 - protein, 7 aa, ARTIFICIAL SEQUENCE
  Synthetic Construct
RSKISRK

SEQ ID NO: 16536 - protein, 7 aa, ARTIFICIAL SEQUENCE
  Synthetic Construct
RSKISSK

SEQ ID NO: 16537 - protein, 7 aa, ARTIFICIAL SEQUENCE
  Synthetic Construct
RSKISTK

SEQ ID NO: 16538 - protein, 7 aa, ARTIFICIAL SEQUENCE
  Synthetic Construct
RSKISYK

SEQ ID NO: 16539 - protein, 7 aa, ARTIFICIAL SEQUENCE
  Synthetic Construct
RSKITAK

SEQ ID NO: 16540 - protein, 7 aa, ARTIFICIAL SEQUENCE
  Synthetic Construct
RSKITDK

SEQ ID NO: 16541 - protein, 7 aa, ARTIFICIAL SEQUENCE
  Synthetic Construct
RSKITEK

SEQ ID NO: 16542 - protein, 7 aa, ARTIFICIAL SEQUENCE
  Synthetic Construct
RSKITFK

SEQ ID NO: 16543 - protein, 7 aa, ARTIFICIAL SEQUENCE
  Synthetic Construct
RSKITGK

SEQ ID NO: 16544 - protein, 7 aa, ARTIFICIAL SEQUENCE
  Synthetic Construct
RSKITHK

SEQ ID NO: 16545 - protein, 7 aa, ARTIFICIAL SEQUENCE
  Synthetic Construct
RSKITIK

SEQ ID NO: 16546 - protein, 7 aa, ARTIFICIAL SEQUENCE
  Synthetic Construct
RSKITLK

SEQ ID NO: 16547 - protein, 7 aa, ARTIFICIAL SEQUENCE
  Synthetic Construct
RSKITNK

SEQ ID NO: 16548 - protein, 7 aa, ARTIFICIAL SEQUENCE
  Synthetic Construct
RSKITQK

SEQ ID NO: 16549 - protein, 7 aa, ARTIFICIAL SEQUENCE
  Synthetic Construct
RSKITRK

SEQ ID NO: 16550 - protein, 7 aa, ARTIFICIAL SEQUENCE
  Synthetic Construct
RSKITSK

SEQ ID NO: 16551 - protein, 7 aa, ARTIFICIAL SEQUENCE
  Synthetic Construct
RSKITTK

SEQ ID NO: 16552 - protein, 7 aa, ARTIFICIAL SEQUENCE
  Synthetic Construct
RSKITYK

SEQ ID NO: 16553 - protein, 7 aa, ARTIFICIAL SEQUENCE
  Synthetic Construct
RSKIYAK

SEQ ID NO: 16554 - protein, 7 aa, ARTIFICIAL SEQUENCE
  Synthetic Construct
RSKIYDK

SEQ ID NO: 16555 - protein, 7 aa, ARTIFICIAL SEQUENCE
  Synthetic Construct
RSKIYEK

SEQ ID NO: 16556 - protein, 7 aa, ARTIFICIAL SEQUENCE
  Synthetic Construct
RSKIYFK

SEQ ID NO: 16557 - protein, 7 aa, ARTIFICIAL SEQUENCE
  Synthetic Construct
RSKIYGK

SEQ ID NO: 16558 - protein, 7 aa, ARTIFICIAL SEQUENCE
  Synthetic Construct
RSKIYHK

SEQ ID NO: 16559 - protein, 7 aa, ARTIFICIAL SEQUENCE
  Synthetic Construct
RSKIYIK

SEQ ID NO: 16560 - protein, 7 aa, ARTIFICIAL SEQUENCE
  Synthetic Construct
RSKIYLK

SEQ ID NO: 16561 - protein, 7 aa, ARTIFICIAL SEQUENCE
  Synthetic Construct
RSKIYNK

SEQ ID NO: 16562 - protein, 7 aa, ARTIFICIAL SEQUENCE
  Synthetic Construct
RSKIYQK

SEQ ID NO: 16563 - protein, 7 aa, ARTIFICIAL SEQUENCE
  Synthetic Construct
RSKIYRK

SEQ ID NO: 16564 - protein, 7 aa, ARTIFICIAL SEQUENCE
  Synthetic Construct
RSKIYSK

SEQ ID NO: 16565 - protein, 7 aa, ARTIFICIAL SEQUENCE
  Synthetic Construct
RSKIYTK

SEQ ID NO: 16566 - protein, 7 aa, ARTIFICIAL SEQUENCE
  Synthetic Construct
RSKIYYK

SEQ ID NO: 16567 - protein, 7 aa, ARTIFICIAL SEQUENCE
  Synthetic Construct
RSKLAAK

SEQ ID NO: 16568 - protein, 7 aa, ARTIFICIAL SEQUENCE
  Synthetic Construct
RSKLADK

SEQ ID NO: 16569 - protein, 7 aa, ARTIFICIAL SEQUENCE
  Synthetic Construct
RSKLAEK

SEQ ID NO: 16570 - protein, 7 aa, ARTIFICIAL SEQUENCE
  Synthetic Construct
RSKLAFK

SEQ ID NO: 16571 - protein, 7 aa, ARTIFICIAL SEQUENCE
  Synthetic Construct
RSKLAGK

SEQ ID NO: 16572 - protein, 7 aa, ARTIFICIAL SEQUENCE
  Synthetic Construct
RSKLAHK

SEQ ID NO: 16573 - protein, 7 aa, ARTIFICIAL SEQUENCE
  Synthetic Construct
RSKLAIK

SEQ ID NO: 16574 - protein, 7 aa, ARTIFICIAL SEQUENCE
  Synthetic Construct
RSKLALK

SEQ ID NO: 16575 - protein, 7 aa, ARTIFICIAL SEQUENCE
  Synthetic Construct
RSKLANK

SEQ ID NO: 16576 - protein, 7 aa, ARTIFICIAL SEQUENCE
  Synthetic Construct
RSKLAQK

SEQ ID NO: 16577 - protein, 7 aa, ARTIFICIAL SEQUENCE
  Synthetic Construct
RSKLARK

SEQ ID NO: 16578 - protein, 7 aa, ARTIFICIAL SEQUENCE
  Synthetic Construct
RSKLASK

SEQ ID NO: 16579 - protein, 7 aa, ARTIFICIAL SEQUENCE
  Synthetic Construct
RSKLATK

SEQ ID NO: 16580 - protein, 7 aa, ARTIFICIAL SEQUENCE
  Synthetic Construct
RSKLAYK

SEQ ID NO: 16581 - protein, 7 aa, ARTIFICIAL SEQUENCE
  Synthetic Construct
RSKLDAK

SEQ ID NO: 16582 - protein, 7 aa, ARTIFICIAL SEQUENCE
  Synthetic Construct
RSKLDDK

SEQ ID NO: 16583 - protein, 7 aa, ARTIFICIAL SEQUENCE
  Synthetic Construct
RSKLDEK

SEQ ID NO: 16584 - protein, 7 aa, ARTIFICIAL SEQUENCE
  Synthetic Construct
RSKLDFK

SEQ ID NO: 16585 - protein, 7 aa, ARTIFICIAL SEQUENCE
  Synthetic Construct
RSKLDGK

SEQ ID NO: 16586 - protein, 7 aa, ARTIFICIAL SEQUENCE
  Synthetic Construct
RSKLDHK

SEQ ID NO: 16587 - protein, 7 aa, ARTIFICIAL SEQUENCE
  Synthetic Construct
RSKLDIK

SEQ ID NO: 16588 - protein, 7 aa, ARTIFICIAL SEQUENCE
  Synthetic Construct
RSKLDLK

SEQ ID NO: 16589 - protein, 7 aa, ARTIFICIAL SEQUENCE
  Synthetic Construct
RSKLDNK

SEQ ID NO: 16590 - protein, 7 aa, ARTIFICIAL SEQUENCE
  Synthetic Construct
RSKLDQK

SEQ ID NO: 16591 - protein, 7 aa, ARTIFICIAL SEQUENCE
  Synthetic Construct
RSKLDRK

SEQ ID NO: 16592 - protein, 7 aa, ARTIFICIAL SEQUENCE
  Synthetic Construct
RSKLDSK

SEQ ID NO: 16593 - protein, 7 aa, ARTIFICIAL SEQUENCE
  Synthetic Construct
RSKLDTK

SEQ ID NO: 16594 - protein, 7 aa, ARTIFICIAL SEQUENCE
  Synthetic Construct
RSKLDYK

SEQ ID NO: 16595 - protein, 7 aa, ARTIFICIAL SEQUENCE
  Synthetic Construct
RSKLEAK

SEQ ID NO: 16596 - protein, 7 aa, ARTIFICIAL SEQUENCE
  Synthetic Construct
RSKLEDK

SEQ ID NO: 16597 - protein, 7 aa, ARTIFICIAL SEQUENCE
  Synthetic Construct
RSKLEEK

SEQ ID NO: 16598 - protein, 7 aa, ARTIFICIAL SEQUENCE
  Synthetic Construct
RSKLEFK

SEQ ID NO: 16599 - protein, 7 aa, ARTIFICIAL SEQUENCE
  Synthetic Construct
RSKLEGK

SEQ ID NO: 16600 - protein, 7 aa, ARTIFICIAL SEQUENCE
  Synthetic Construct
RSKLEHK

SEQ ID NO: 16601 - protein, 7 aa, ARTIFICIAL SEQUENCE
  Synthetic Construct
RSKLEIK

SEQ ID NO: 16602 - protein, 7 aa, ARTIFICIAL SEQUENCE
  Synthetic Construct
RSKLELK

SEQ ID NO: 16603 - protein, 7 aa, ARTIFICIAL SEQUENCE
  Synthetic Construct
RSKLENK

SEQ ID NO: 16604 - protein, 7 aa, ARTIFICIAL SEQUENCE
  Synthetic Construct
RSKLEQK

SEQ ID NO: 16605 - protein, 7 aa, ARTIFICIAL SEQUENCE
  Synthetic Construct
RSKLERK

SEQ ID NO: 16606 - protein, 7 aa, ARTIFICIAL SEQUENCE
  Synthetic Construct
RSKLESK

SEQ ID NO: 16607 - protein, 7 aa, ARTIFICIAL SEQUENCE
  Synthetic Construct
RSKLETK

SEQ ID NO: 16608 - protein, 7 aa, ARTIFICIAL SEQUENCE
  Synthetic Construct
RSKLEYK

SEQ ID NO: 16609 - protein, 7 aa, ARTIFICIAL SEQUENCE
  Synthetic Construct
RSKLFAK

SEQ ID NO: 16610 - protein, 7 aa, ARTIFICIAL SEQUENCE
  Synthetic Construct
RSKLFDK

SEQ ID NO: 16611 - protein, 7 aa, ARTIFICIAL SEQUENCE
  Synthetic Construct
RSKLFEK

SEQ ID NO: 16612 - protein, 7 aa, ARTIFICIAL SEQUENCE
  Synthetic Construct
RSKLFFK

SEQ ID NO: 16613 - protein, 7 aa, ARTIFICIAL SEQUENCE
  Synthetic Construct
RSKLFGK

SEQ ID NO: 16614 - protein, 7 aa, ARTIFICIAL SEQUENCE
  Synthetic Construct
RSKLFHK

SEQ ID NO: 16615 - protein, 7 aa, ARTIFICIAL SEQUENCE
  Synthetic Construct
RSKLFIK

SEQ ID NO: 16616 - protein, 7 aa, ARTIFICIAL SEQUENCE
  Synthetic Construct
RSKLFLK

SEQ ID NO: 16617 - protein, 7 aa, ARTIFICIAL SEQUENCE
  Synthetic Construct
RSKLFNK

SEQ ID NO: 16618 - protein, 7 aa, ARTIFICIAL SEQUENCE
  Synthetic Construct
RSKLFQK

SEQ ID NO: 16619 - protein, 7 aa, ARTIFICIAL SEQUENCE
  Synthetic Construct
RSKLFRK

SEQ ID NO: 16620 - protein, 7 aa, ARTIFICIAL SEQUENCE
  Synthetic Construct
RSKLFSK

SEQ ID NO: 16621 - protein, 7 aa, ARTIFICIAL SEQUENCE
  Synthetic Construct
RSKLFTK

SEQ ID NO: 16622 - protein, 7 aa, ARTIFICIAL SEQUENCE
  Synthetic Construct
RSKLFYK

SEQ ID NO: 16623 - protein, 7 aa, ARTIFICIAL SEQUENCE
  Synthetic Construct
RSKLGAK

SEQ ID NO: 16624 - protein, 7 aa, ARTIFICIAL SEQUENCE
  Synthetic Construct
RSKLGDK

SEQ ID NO: 16625 - protein, 7 aa, ARTIFICIAL SEQUENCE
  Synthetic Construct
RSKLGEK

SEQ ID NO: 16626 - protein, 7 aa, ARTIFICIAL SEQUENCE
  Synthetic Construct
RSKLGFK

SEQ ID NO: 16627 - protein, 7 aa, ARTIFICIAL SEQUENCE
  Synthetic Construct
RSKLGGK

SEQ ID NO: 16628 - protein, 7 aa, ARTIFICIAL SEQUENCE
  Synthetic Construct
RSKLGHK

SEQ ID NO: 16629 - protein, 7 aa, ARTIFICIAL SEQUENCE
  Synthetic Construct
RSKLGIK

SEQ ID NO: 16630 - protein, 7 aa, ARTIFICIAL SEQUENCE
  Synthetic Construct
RSKLGLK

SEQ ID NO: 16631 - protein, 7 aa, ARTIFICIAL SEQUENCE
  Synthetic Construct
RSKLGNK

SEQ ID NO: 16632 - protein, 7 aa, ARTIFICIAL SEQUENCE
  Synthetic Construct
RSKLGQK

SEQ ID NO: 16633 - protein, 7 aa, ARTIFICIAL SEQUENCE
  Synthetic Construct
RSKLGRK

SEQ ID NO: 16634 - protein, 7 aa, ARTIFICIAL SEQUENCE
  Synthetic Construct
RSKLGSK

SEQ ID NO: 16635 - protein, 7 aa, ARTIFICIAL SEQUENCE
  Synthetic Construct
RSKLGTK

SEQ ID NO: 16636 - protein, 7 aa, ARTIFICIAL SEQUENCE
  Synthetic Construct
RSKLGYK

SEQ ID NO: 16637 - protein, 7 aa, ARTIFICIAL SEQUENCE
  Synthetic Construct
RSKLHAK

SEQ ID NO: 16638 - protein, 7 aa, ARTIFICIAL SEQUENCE
  Synthetic Construct
RSKLHDK

SEQ ID NO: 16639 - protein, 7 aa, ARTIFICIAL SEQUENCE
  Synthetic Construct
RSKLHEK

SEQ ID NO: 16640 - protein, 7 aa, ARTIFICIAL SEQUENCE
  Synthetic Construct
RSKLHFK

SEQ ID NO: 16641 - protein, 7 aa, ARTIFICIAL SEQUENCE
  Synthetic Construct
RSKLHGK

SEQ ID NO: 16642 - protein, 7 aa, ARTIFICIAL SEQUENCE
  Synthetic Construct
RSKLHHK

SEQ ID NO: 16643 - protein, 7 aa, ARTIFICIAL SEQUENCE
  Synthetic Construct
RSKLHIK

SEQ ID NO: 16644 - protein, 7 aa, ARTIFICIAL SEQUENCE
  Synthetic Construct
RSKLHLK

SEQ ID NO: 16645 - protein, 7 aa, ARTIFICIAL SEQUENCE
  Synthetic Construct
RSKLHNK

SEQ ID NO: 16646 - protein, 7 aa, ARTIFICIAL SEQUENCE
  Synthetic Construct
RSKLHQK

SEQ ID NO: 16647 - protein, 7 aa, ARTIFICIAL SEQUENCE
  Synthetic Construct
RSKLHRK

SEQ ID NO: 16648 - protein, 7 aa, ARTIFICIAL SEQUENCE
  Synthetic Construct
RSKLHSK

SEQ ID NO: 16649 - protein, 7 aa, ARTIFICIAL SEQUENCE
  Synthetic Construct
RSKLHTK

SEQ ID NO: 16650 - protein, 7 aa, ARTIFICIAL SEQUENCE
  Synthetic Construct
RSKLHYK

SEQ ID NO: 16651 - protein, 7 aa, ARTIFICIAL SEQUENCE
  Synthetic Construct
RSKLIAK

SEQ ID NO: 16652 - protein, 7 aa, ARTIFICIAL SEQUENCE
  Synthetic Construct
RSKLIDK

SEQ ID NO: 16653 - protein, 7 aa, ARTIFICIAL SEQUENCE
  Synthetic Construct
RSKLIEK

SEQ ID NO: 16654 - protein, 7 aa, ARTIFICIAL SEQUENCE
  Synthetic Construct
RSKLIFK

SEQ ID NO: 16655 - protein, 7 aa, ARTIFICIAL SEQUENCE
  Synthetic Construct
RSKLIGK

SEQ ID NO: 16656 - protein, 7 aa, ARTIFICIAL SEQUENCE
  Synthetic Construct
RSKLIHK

SEQ ID NO: 16657 - protein, 7 aa, ARTIFICIAL SEQUENCE
  Synthetic Construct
RSKLIIK

SEQ ID NO: 16658 - protein, 7 aa, ARTIFICIAL SEQUENCE
  Synthetic Construct
RSKLILK

SEQ ID NO: 16659 - protein, 7 aa, ARTIFICIAL SEQUENCE
  Synthetic Construct
RSKLINK

SEQ ID NO: 16660 - protein, 7 aa, ARTIFICIAL SEQUENCE
  Synthetic Construct
RSKLIQK

SEQ ID NO: 16661 - protein, 7 aa, ARTIFICIAL SEQUENCE
  Synthetic Construct
RSKLIRK

SEQ ID NO: 16662 - protein, 7 aa, ARTIFICIAL SEQUENCE
  Synthetic Construct
RSKLISK

SEQ ID NO: 16663 - protein, 7 aa, ARTIFICIAL SEQUENCE
  Synthetic Construct
RSKLITK

SEQ ID NO: 16664 - protein, 7 aa, ARTIFICIAL SEQUENCE
  Synthetic Construct
RSKLIYK

SEQ ID NO: 16665 - protein, 7 aa, ARTIFICIAL SEQUENCE
  Synthetic Construct
RSKLLAK

SEQ ID NO: 16666 - protein, 7 aa, ARTIFICIAL SEQUENCE
  Synthetic Construct
RSKLLDK

SEQ ID NO: 16667 - protein, 7 aa, ARTIFICIAL SEQUENCE
  Synthetic Construct
RSKLLEK

SEQ ID NO: 16668 - protein, 7 aa, ARTIFICIAL SEQUENCE
  Synthetic Construct
RSKLLFK

SEQ ID NO: 16669 - protein, 7 aa, ARTIFICIAL SEQUENCE
  Synthetic Construct
RSKLLGK

SEQ ID NO: 16670 - protein, 7 aa, ARTIFICIAL SEQUENCE
  Synthetic Construct
RSKLLHK

SEQ ID NO: 16671 - protein, 7 aa, ARTIFICIAL SEQUENCE
  Synthetic Construct
RSKLLIK

SEQ ID NO: 16672 - protein, 7 aa, ARTIFICIAL SEQUENCE
  Synthetic Construct
RSKLLLK

SEQ ID NO: 16673 - protein, 7 aa, ARTIFICIAL SEQUENCE
  Synthetic Construct
RSKLLNK

SEQ ID NO: 16674 - protein, 7 aa, ARTIFICIAL SEQUENCE
  Synthetic Construct
RSKLLQK

SEQ ID NO: 16675 - protein, 7 aa, ARTIFICIAL SEQUENCE
  Synthetic Construct
RSKLLRK

SEQ ID NO: 16676 - protein, 7 aa, ARTIFICIAL SEQUENCE
  Synthetic Construct
RSKLLSK

SEQ ID NO: 16677 - protein, 7 aa, ARTIFICIAL SEQUENCE
  Synthetic Construct
RSKLLTK

SEQ ID NO: 16678 - protein, 7 aa, ARTIFICIAL SEQUENCE
  Synthetic Construct
RSKLLYK

SEQ ID NO: 16679 - protein, 7 aa, ARTIFICIAL SEQUENCE
  Synthetic Construct
RSKLNAK

SEQ ID NO: 16680 - protein, 7 aa, ARTIFICIAL SEQUENCE
  Synthetic Construct
RSKLNDK

SEQ ID NO: 16681 - protein, 7 aa, ARTIFICIAL SEQUENCE
  Synthetic Construct
RSKLNEK

SEQ ID NO: 16682 - protein, 7 aa, ARTIFICIAL SEQUENCE
  Synthetic Construct
RSKLNFK

SEQ ID NO: 16683 - protein, 7 aa, ARTIFICIAL SEQUENCE
  Synthetic Construct
RSKLNGK

SEQ ID NO: 16684 - protein, 7 aa, ARTIFICIAL SEQUENCE
  Synthetic Construct
RSKLNHK

SEQ ID NO: 16685 - protein, 7 aa, ARTIFICIAL SEQUENCE
  Synthetic Construct
RSKLNIK

SEQ ID NO: 16686 - protein, 7 aa, ARTIFICIAL SEQUENCE
  Synthetic Construct
RSKLNLK

SEQ ID NO: 16687 - protein, 7 aa, ARTIFICIAL SEQUENCE
  Synthetic Construct
RSKLNNK

SEQ ID NO: 16688 - protein, 7 aa, ARTIFICIAL SEQUENCE
  Synthetic Construct
RSKLNQK

SEQ ID NO: 16689 - protein, 7 aa, ARTIFICIAL SEQUENCE
  Synthetic Construct
RSKLNRK

SEQ ID NO: 16690 - protein, 7 aa, ARTIFICIAL SEQUENCE
  Synthetic Construct
RSKLNSK

SEQ ID NO: 16691 - protein, 7 aa, ARTIFICIAL SEQUENCE
  Synthetic Construct
RSKLNTK

SEQ ID NO: 16692 - protein, 7 aa, ARTIFICIAL SEQUENCE
  Synthetic Construct
RSKLNYK

SEQ ID NO: 16693 - protein, 7 aa, ARTIFICIAL SEQUENCE
  Synthetic Construct
RSKLQAK

SEQ ID NO: 16694 - protein, 7 aa, ARTIFICIAL SEQUENCE
  Synthetic Construct
RSKLQDK

SEQ ID NO: 16695 - protein, 7 aa, ARTIFICIAL SEQUENCE
  Synthetic Construct
RSKLQEK

SEQ ID NO: 16696 - protein, 7 aa, ARTIFICIAL SEQUENCE
  Synthetic Construct
RSKLQFK

SEQ ID NO: 16697 - protein, 7 aa, ARTIFICIAL SEQUENCE
  Synthetic Construct
RSKLQGK

SEQ ID NO: 16698 - protein, 7 aa, ARTIFICIAL SEQUENCE
  Synthetic Construct
RSKLQHK

SEQ ID NO: 16699 - protein, 7 aa, ARTIFICIAL SEQUENCE
  Synthetic Construct
RSKLQIK

SEQ ID NO: 16700 - protein, 7 aa, ARTIFICIAL SEQUENCE
  Synthetic Construct
RSKLQLK

SEQ ID NO: 16701 - protein, 7 aa, ARTIFICIAL SEQUENCE
  Synthetic Construct
RSKLQNK

SEQ ID NO: 16702 - protein, 7 aa, ARTIFICIAL SEQUENCE
  Synthetic Construct
RSKLQQK

SEQ ID NO: 16703 - protein, 7 aa, ARTIFICIAL SEQUENCE
  Synthetic Construct
RSKLQRK

SEQ ID NO: 16704 - protein, 7 aa, ARTIFICIAL SEQUENCE
  Synthetic Construct
RSKLQSK

SEQ ID NO: 16705 - protein, 7 aa, ARTIFICIAL SEQUENCE
  Synthetic Construct
RSKLQTK

SEQ ID NO: 16706 - protein, 7 aa, ARTIFICIAL SEQUENCE
  Synthetic Construct
RSKLQYK

SEQ ID NO: 16707 - protein, 7 aa, ARTIFICIAL SEQUENCE
  Synthetic Construct
RSKLRAK

SEQ ID NO: 16708 - protein, 7 aa, ARTIFICIAL SEQUENCE
  Synthetic Construct
RSKLRDK

SEQ ID NO: 16709 - protein, 7 aa, ARTIFICIAL SEQUENCE
  Synthetic Construct
RSKLREK

SEQ ID NO: 16710 - protein, 7 aa, ARTIFICIAL SEQUENCE
  Synthetic Construct
RSKLRFK

SEQ ID NO: 16711 - protein, 7 aa, ARTIFICIAL SEQUENCE
  Synthetic Construct
RSKLRGK

SEQ ID NO: 16712 - protein, 7 aa, ARTIFICIAL SEQUENCE
  Synthetic Construct
RSKLRHK

SEQ ID NO: 16713 - protein, 7 aa, ARTIFICIAL SEQUENCE
  Synthetic Construct
RSKLRIK

SEQ ID NO: 16714 - protein, 7 aa, ARTIFICIAL SEQUENCE
  Synthetic Construct
RSKLRLK

SEQ ID NO: 16715 - protein, 7 aa, ARTIFICIAL SEQUENCE
  Synthetic Construct
RSKLRNK

SEQ ID NO: 16716 - protein, 7 aa, ARTIFICIAL SEQUENCE
  Synthetic Construct
RSKLRQK

SEQ ID NO: 16717 - protein, 7 aa, ARTIFICIAL SEQUENCE
  Synthetic Construct
RSKLRRK

SEQ ID NO: 16718 - protein, 7 aa, ARTIFICIAL SEQUENCE
  Synthetic Construct
RSKLRSK

SEQ ID NO: 16719 - protein, 7 aa, ARTIFICIAL SEQUENCE
  Synthetic Construct
RSKLRTK

SEQ ID NO: 16720 - protein, 7 aa, ARTIFICIAL SEQUENCE
  Synthetic Construct
RSKLRYK

SEQ ID NO: 16721 - protein, 7 aa, ARTIFICIAL SEQUENCE
  Synthetic Construct
RSKLSAK

SEQ ID NO: 16722 - protein, 7 aa, ARTIFICIAL SEQUENCE
  Synthetic Construct
RSKLSDK

SEQ ID NO: 16723 - protein, 7 aa, ARTIFICIAL SEQUENCE
  Synthetic Construct
RSKLSEK

SEQ ID NO: 16724 - protein, 7 aa, ARTIFICIAL SEQUENCE
  Synthetic Construct
RSKLSFK

SEQ ID NO: 16725 - protein, 7 aa, ARTIFICIAL SEQUENCE
  Synthetic Construct
RSKLSGK

SEQ ID NO: 16726 - protein, 7 aa, ARTIFICIAL SEQUENCE
  Synthetic Construct
RSKLSHK

SEQ ID NO: 16727 - protein, 7 aa, ARTIFICIAL SEQUENCE
  Synthetic Construct
RSKLSIK

SEQ ID NO: 16728 - protein, 7 aa, ARTIFICIAL SEQUENCE
  Synthetic Construct
RSKLSLK

SEQ ID NO: 16729 - protein, 7 aa, ARTIFICIAL SEQUENCE
  Synthetic Construct
RSKLSNK

SEQ ID NO: 16730 - protein, 7 aa, ARTIFICIAL SEQUENCE
  Synthetic Construct
RSKLSQK

SEQ ID NO: 16731 - protein, 7 aa, ARTIFICIAL SEQUENCE
  Synthetic Construct
RSKLSRK

SEQ ID NO: 16732 - protein, 7 aa, ARTIFICIAL SEQUENCE
  Synthetic Construct
RSKLSSK

SEQ ID NO: 16733 - protein, 7 aa, ARTIFICIAL SEQUENCE
  Synthetic Construct
RSKLSTK

SEQ ID NO: 16734 - protein, 7 aa, ARTIFICIAL SEQUENCE
  Synthetic Construct
RSKLSYK

SEQ ID NO: 16735 - protein, 7 aa, ARTIFICIAL SEQUENCE
  Synthetic Construct
RSKLTAK

SEQ ID NO: 16736 - protein, 7 aa, ARTIFICIAL SEQUENCE
  Synthetic Construct
RSKLTDK

SEQ ID NO: 16737 - protein, 7 aa, ARTIFICIAL SEQUENCE
  Synthetic Construct
RSKLTEK

SEQ ID NO: 16738 - protein, 7 aa, ARTIFICIAL SEQUENCE
  Synthetic Construct
RSKLTFK

SEQ ID NO: 16739 - protein, 7 aa, ARTIFICIAL SEQUENCE
  Synthetic Construct
RSKLTGK

SEQ ID NO: 16740 - protein, 7 aa, ARTIFICIAL SEQUENCE
  Synthetic Construct
RSKLTHK

SEQ ID NO: 16741 - protein, 7 aa, ARTIFICIAL SEQUENCE
  Synthetic Construct
RSKLTIK

SEQ ID NO: 16742 - protein, 7 aa, ARTIFICIAL SEQUENCE
  Synthetic Construct
RSKLTLK

SEQ ID NO: 16743 - protein, 7 aa, ARTIFICIAL SEQUENCE
  Synthetic Construct
RSKLTNK

SEQ ID NO: 16744 - protein, 7 aa, ARTIFICIAL SEQUENCE
  Synthetic Construct
RSKLTQK

SEQ ID NO: 16745 - protein, 7 aa, ARTIFICIAL SEQUENCE
  Synthetic Construct
RSKLTRK

SEQ ID NO: 16746 - protein, 7 aa, ARTIFICIAL SEQUENCE
  Synthetic Construct
RSKLTSK

SEQ ID NO: 16747 - protein, 7 aa, ARTIFICIAL SEQUENCE
  Synthetic Construct
RSKLTTK

SEQ ID NO: 16748 - protein, 7 aa, ARTIFICIAL SEQUENCE
  Synthetic Construct
RSKLTYK

SEQ ID NO: 16749 - protein, 7 aa, ARTIFICIAL SEQUENCE
  Synthetic Construct
RSKLYAK

SEQ ID NO: 16750 - protein, 7 aa, ARTIFICIAL SEQUENCE
  Synthetic Construct
RSKLYDK

SEQ ID NO: 16751 - protein, 7 aa, ARTIFICIAL SEQUENCE
  Synthetic Construct
RSKLYEK

SEQ ID NO: 16752 - protein, 7 aa, ARTIFICIAL SEQUENCE
  Synthetic Construct
RSKLYFK

SEQ ID NO: 16753 - protein, 7 aa, ARTIFICIAL SEQUENCE
  Synthetic Construct
RSKLYGK

SEQ ID NO: 16754 - protein, 7 aa, ARTIFICIAL SEQUENCE
  Synthetic Construct
RSKLYHK

SEQ ID NO: 16755 - protein, 7 aa, ARTIFICIAL SEQUENCE
  Synthetic Construct
RSKLYIK

SEQ ID NO: 16756 - protein, 7 aa, ARTIFICIAL SEQUENCE
  Synthetic Construct
RSKLYLK

SEQ ID NO: 16757 - protein, 7 aa, ARTIFICIAL SEQUENCE
  Synthetic Construct
RSKLYNK

SEQ ID NO: 16758 - protein, 7 aa, ARTIFICIAL SEQUENCE
  Synthetic Construct
RSKLYQK

SEQ ID NO: 16759 - protein, 7 aa, ARTIFICIAL SEQUENCE
  Synthetic Construct
RSKLYRK

SEQ ID NO: 16760 - protein, 7 aa, ARTIFICIAL SEQUENCE
  Synthetic Construct
RSKLYSK

SEQ ID NO: 16761 - protein, 7 aa, ARTIFICIAL SEQUENCE
  Synthetic Construct
RSKLYTK

SEQ ID NO: 16762 - protein, 7 aa, ARTIFICIAL SEQUENCE
  Synthetic Construct
RSKLYYK

SEQ ID NO: 16763 - protein, 7 aa, ARTIFICIAL SEQUENCE
  Synthetic Construct
RSKNAAK

SEQ ID NO: 16764 - protein, 7 aa, ARTIFICIAL SEQUENCE
  Synthetic Construct
RSKNADK

SEQ ID NO: 16765 - protein, 7 aa, ARTIFICIAL SEQUENCE
  Synthetic Construct
RSKNAEK

SEQ ID NO: 16766 - protein, 7 aa, ARTIFICIAL SEQUENCE
  Synthetic Construct
RSKNAFK

SEQ ID NO: 16767 - protein, 7 aa, ARTIFICIAL SEQUENCE
  Synthetic Construct
RSKNAGK

SEQ ID NO: 16768 - protein, 7 aa, ARTIFICIAL SEQUENCE
  Synthetic Construct
RSKNAHK

SEQ ID NO: 16769 - protein, 7 aa, ARTIFICIAL SEQUENCE
  Synthetic Construct
RSKNAIK

SEQ ID NO: 16770 - protein, 7 aa, ARTIFICIAL SEQUENCE
  Synthetic Construct
RSKNALK

SEQ ID NO: 16771 - protein, 7 aa, ARTIFICIAL SEQUENCE
  Synthetic Construct
RSKNANK

SEQ ID NO: 16772 - protein, 7 aa, ARTIFICIAL SEQUENCE
  Synthetic Construct
RSKNAQK

SEQ ID NO: 16773 - protein, 7 aa, ARTIFICIAL SEQUENCE
  Synthetic Construct
RSKNARK

SEQ ID NO: 16774 - protein, 7 aa, ARTIFICIAL SEQUENCE
  Synthetic Construct
RSKNASK

SEQ ID NO: 16775 - protein, 7 aa, ARTIFICIAL SEQUENCE
  Synthetic Construct
RSKNATK

SEQ ID NO: 16776 - protein, 7 aa, ARTIFICIAL SEQUENCE
  Synthetic Construct
RSKNAYK

SEQ ID NO: 16777 - protein, 7 aa, ARTIFICIAL SEQUENCE
  Synthetic Construct
RSKNDAK

SEQ ID NO: 16778 - protein, 7 aa, ARTIFICIAL SEQUENCE
  Synthetic Construct
RSKNDDK

SEQ ID NO: 16779 - protein, 7 aa, ARTIFICIAL SEQUENCE
  Synthetic Construct
RSKNDEK

SEQ ID NO: 16780 - protein, 7 aa, ARTIFICIAL SEQUENCE
  Synthetic Construct
RSKNDFK

SEQ ID NO: 16781 - protein, 7 aa, ARTIFICIAL SEQUENCE
  Synthetic Construct
RSKNDGK

SEQ ID NO: 16782 - protein, 7 aa, ARTIFICIAL SEQUENCE
  Synthetic Construct
RSKNDHK

SEQ ID NO: 16783 - protein, 7 aa, ARTIFICIAL SEQUENCE
  Synthetic Construct
RSKNDIK

SEQ ID NO: 16784 - protein, 7 aa, ARTIFICIAL SEQUENCE
  Synthetic Construct
RSKNDLK

SEQ ID NO: 16785 - protein, 7 aa, ARTIFICIAL SEQUENCE
  Synthetic Construct
RSKNDNK

SEQ ID NO: 16786 - protein, 7 aa, ARTIFICIAL SEQUENCE
  Synthetic Construct
RSKNDQK

SEQ ID NO: 16787 - protein, 7 aa, ARTIFICIAL SEQUENCE
  Synthetic Construct
RSKNDRK

SEQ ID NO: 16788 - protein, 7 aa, ARTIFICIAL SEQUENCE
  Synthetic Construct
RSKNDSK

SEQ ID NO: 16789 - protein, 7 aa, ARTIFICIAL SEQUENCE
  Synthetic Construct
RSKNDTK

SEQ ID NO: 16790 - protein, 7 aa, ARTIFICIAL SEQUENCE
  Synthetic Construct
RSKNDYK

SEQ ID NO: 16791 - protein, 7 aa, ARTIFICIAL SEQUENCE
  Synthetic Construct
RSKNEAK

SEQ ID NO: 16792 - protein, 7 aa, ARTIFICIAL SEQUENCE
  Synthetic Construct
RSKNEDK

SEQ ID NO: 16793 - protein, 7 aa, ARTIFICIAL SEQUENCE
  Synthetic Construct
RSKNEEK

SEQ ID NO: 16794 - protein, 7 aa, ARTIFICIAL SEQUENCE
  Synthetic Construct
RSKNEFK

SEQ ID NO: 16795 - protein, 7 aa, ARTIFICIAL SEQUENCE
  Synthetic Construct
RSKNEGK

SEQ ID NO: 16796 - protein, 7 aa, ARTIFICIAL SEQUENCE
  Synthetic Construct
RSKNEHK

SEQ ID NO: 16797 - protein, 7 aa, ARTIFICIAL SEQUENCE
  Synthetic Construct
RSKNEIK

SEQ ID NO: 16798 - protein, 7 aa, ARTIFICIAL SEQUENCE
  Synthetic Construct
RSKNELK

SEQ ID NO: 16799 - protein, 7 aa, ARTIFICIAL SEQUENCE
  Synthetic Construct
RSKNENK

SEQ ID NO: 16800 - protein, 7 aa, ARTIFICIAL SEQUENCE
  Synthetic Construct
RSKNEQK

SEQ ID NO: 16801 - protein, 7 aa, ARTIFICIAL SEQUENCE
  Synthetic Construct
RSKNERK

SEQ ID NO: 16802 - protein, 7 aa, ARTIFICIAL SEQUENCE
  Synthetic Construct
RSKNESK

SEQ ID NO: 16803 - protein, 7 aa, ARTIFICIAL SEQUENCE
  Synthetic Construct
RSKNETK

SEQ ID NO: 16804 - protein, 7 aa, ARTIFICIAL SEQUENCE
  Synthetic Construct
RSKNEYK

SEQ ID NO: 16805 - protein, 7 aa, ARTIFICIAL SEQUENCE
  Synthetic Construct
RSKNFAK

SEQ ID NO: 16806 - protein, 7 aa, ARTIFICIAL SEQUENCE
  Synthetic Construct
RSKNFDK

SEQ ID NO: 16807 - protein, 7 aa, ARTIFICIAL SEQUENCE
  Synthetic Construct
RSKNFEK

SEQ ID NO: 16808 - protein, 7 aa, ARTIFICIAL SEQUENCE
  Synthetic Construct
RSKNFFK

SEQ ID NO: 16809 - protein, 7 aa, ARTIFICIAL SEQUENCE
  Synthetic Construct
RSKNFGK

SEQ ID NO: 16810 - protein, 7 aa, ARTIFICIAL SEQUENCE
  Synthetic Construct
RSKNFHK

SEQ ID NO: 16811 - protein, 7 aa, ARTIFICIAL SEQUENCE
  Synthetic Construct
RSKNFIK

SEQ ID NO: 16812 - protein, 7 aa, ARTIFICIAL SEQUENCE
  Synthetic Construct
RSKNFLK

SEQ ID NO: 16813 - protein, 7 aa, ARTIFICIAL SEQUENCE
  Synthetic Construct
RSKNFNK

SEQ ID NO: 16814 - protein, 7 aa, ARTIFICIAL SEQUENCE
  Synthetic Construct
RSKNFQK

SEQ ID NO: 16815 - protein, 7 aa, ARTIFICIAL SEQUENCE
  Synthetic Construct
RSKNFRK

SEQ ID NO: 16816 - protein, 7 aa, ARTIFICIAL SEQUENCE
  Synthetic Construct
RSKNFSK

SEQ ID NO: 16817 - protein, 7 aa, ARTIFICIAL SEQUENCE
  Synthetic Construct
RSKNFTK

SEQ ID NO: 16818 - protein, 7 aa, ARTIFICIAL SEQUENCE
  Synthetic Construct
RSKNFYK

SEQ ID NO: 16819 - protein, 7 aa, ARTIFICIAL SEQUENCE
  Synthetic Construct
RSKNGAK

SEQ ID NO: 16820 - protein, 7 aa, ARTIFICIAL SEQUENCE
  Synthetic Construct
RSKNGDK

SEQ ID NO: 16821 - protein, 7 aa, ARTIFICIAL SEQUENCE
  Synthetic Construct
RSKNGEK

SEQ ID NO: 16822 - protein, 7 aa, ARTIFICIAL SEQUENCE
  Synthetic Construct
RSKNGFK

SEQ ID NO: 16823 - protein, 7 aa, ARTIFICIAL SEQUENCE
  Synthetic Construct
RSKNGGK

SEQ ID NO: 16824 - protein, 7 aa, ARTIFICIAL SEQUENCE
  Synthetic Construct
RSKNGHK

SEQ ID NO: 16825 - protein, 7 aa, ARTIFICIAL SEQUENCE
  Synthetic Construct
RSKNGIK

SEQ ID NO: 16826 - protein, 7 aa, ARTIFICIAL SEQUENCE
  Synthetic Construct
RSKNGLK

SEQ ID NO: 16827 - protein, 7 aa, ARTIFICIAL SEQUENCE
  Synthetic Construct
RSKNGNK

SEQ ID NO: 16828 - protein, 7 aa, ARTIFICIAL SEQUENCE
  Synthetic Construct
RSKNGQK

SEQ ID NO: 16829 - protein, 7 aa, ARTIFICIAL SEQUENCE
  Synthetic Construct
RSKNGRK

SEQ ID NO: 16830 - protein, 7 aa, ARTIFICIAL SEQUENCE
  Synthetic Construct
RSKNGSK

SEQ ID NO: 16831 - protein, 7 aa, ARTIFICIAL SEQUENCE
  Synthetic Construct
RSKNGTK

SEQ ID NO: 16832 - protein, 7 aa, ARTIFICIAL SEQUENCE
  Synthetic Construct
RSKNGYK

SEQ ID NO: 16833 - protein, 7 aa, ARTIFICIAL SEQUENCE
  Synthetic Construct
RSKNHAK

SEQ ID NO: 16834 - protein, 7 aa, ARTIFICIAL SEQUENCE
  Synthetic Construct
RSKNHDK

SEQ ID NO: 16835 - protein, 7 aa, ARTIFICIAL SEQUENCE
  Synthetic Construct
RSKNHEK

SEQ ID NO: 16836 - protein, 7 aa, ARTIFICIAL SEQUENCE
  Synthetic Construct
RSKNHFK

SEQ ID NO: 16837 - protein, 7 aa, ARTIFICIAL SEQUENCE
  Synthetic Construct
RSKNHGK

SEQ ID NO: 16838 - protein, 7 aa, ARTIFICIAL SEQUENCE
  Synthetic Construct
RSKNHHK

SEQ ID NO: 16839 - protein, 7 aa, ARTIFICIAL SEQUENCE
  Synthetic Construct
RSKNHIK

SEQ ID NO: 16840 - protein, 7 aa, ARTIFICIAL SEQUENCE
  Synthetic Construct
RSKNHLK

SEQ ID NO: 16841 - protein, 7 aa, ARTIFICIAL SEQUENCE
  Synthetic Construct
RSKNHNK

SEQ ID NO: 16842 - protein, 7 aa, ARTIFICIAL SEQUENCE
  Synthetic Construct
RSKNHQK

SEQ ID NO: 16843 - protein, 7 aa, ARTIFICIAL SEQUENCE
  Synthetic Construct
RSKNHRK

SEQ ID NO: 16844 - protein, 7 aa, ARTIFICIAL SEQUENCE
  Synthetic Construct
RSKNHSK

SEQ ID NO: 16845 - protein, 7 aa, ARTIFICIAL SEQUENCE
  Synthetic Construct
RSKNHTK

SEQ ID NO: 16846 - protein, 7 aa, ARTIFICIAL SEQUENCE
  Synthetic Construct
RSKNHYK

SEQ ID NO: 16847 - protein, 7 aa, ARTIFICIAL SEQUENCE
  Synthetic Construct
RSKNIAK

SEQ ID NO: 16848 - protein, 7 aa, ARTIFICIAL SEQUENCE
  Synthetic Construct
RSKNIDK

SEQ ID NO: 16849 - protein, 7 aa, ARTIFICIAL SEQUENCE
  Synthetic Construct
RSKNIEK

SEQ ID NO: 16850 - protein, 7 aa, ARTIFICIAL SEQUENCE
  Synthetic Construct
RSKNIFK

SEQ ID NO: 16851 - protein, 7 aa, ARTIFICIAL SEQUENCE
  Synthetic Construct
RSKNIGK

SEQ ID NO: 16852 - protein, 7 aa, ARTIFICIAL SEQUENCE
  Synthetic Construct
RSKNIHK

SEQ ID NO: 16853 - protein, 7 aa, ARTIFICIAL SEQUENCE
  Synthetic Construct
RSKNIIK

SEQ ID NO: 16854 - protein, 7 aa, ARTIFICIAL SEQUENCE
  Synthetic Construct
RSKNILK

SEQ ID NO: 16855 - protein, 7 aa, ARTIFICIAL SEQUENCE
  Synthetic Construct
RSKNINK

SEQ ID NO: 16856 - protein, 7 aa, ARTIFICIAL SEQUENCE
  Synthetic Construct
RSKNIQK

SEQ ID NO: 16857 - protein, 7 aa, ARTIFICIAL SEQUENCE
  Synthetic Construct
RSKNIRK

SEQ ID NO: 16858 - protein, 7 aa, ARTIFICIAL SEQUENCE
  Synthetic Construct
RSKNISK

SEQ ID NO: 16859 - protein, 7 aa, ARTIFICIAL SEQUENCE
  Synthetic Construct
RSKNITK

SEQ ID NO: 16860 - protein, 7 aa, ARTIFICIAL SEQUENCE
  Synthetic Construct
RSKNIYK

SEQ ID NO: 16861 - protein, 7 aa, ARTIFICIAL SEQUENCE
  Synthetic Construct
RSKNLAK

SEQ ID NO: 16862 - protein, 7 aa, ARTIFICIAL SEQUENCE
  Synthetic Construct
RSKNLDK

SEQ ID NO: 16863 - protein, 7 aa, ARTIFICIAL SEQUENCE
  Synthetic Construct
RSKNLEK

SEQ ID NO: 16864 - protein, 7 aa, ARTIFICIAL SEQUENCE
  Synthetic Construct
RSKNLFK

SEQ ID NO: 16865 - protein, 7 aa, ARTIFICIAL SEQUENCE
  Synthetic Construct
RSKNLGK

SEQ ID NO: 16866 - protein, 7 aa, ARTIFICIAL SEQUENCE
  Synthetic Construct
RSKNLHK

SEQ ID NO: 16867 - protein, 7 aa, ARTIFICIAL SEQUENCE
  Synthetic Construct
RSKNLIK

SEQ ID NO: 16868 - protein, 7 aa, ARTIFICIAL SEQUENCE
  Synthetic Construct
RSKNLLK

SEQ ID NO: 16869 - protein, 7 aa, ARTIFICIAL SEQUENCE
  Synthetic Construct
RSKNLNK

SEQ ID NO: 16870 - protein, 7 aa, ARTIFICIAL SEQUENCE
  Synthetic Construct
RSKNLQK

SEQ ID NO: 16871 - protein, 7 aa, ARTIFICIAL SEQUENCE
  Synthetic Construct
RSKNLRK

SEQ ID NO: 16872 - protein, 7 aa, ARTIFICIAL SEQUENCE
  Synthetic Construct
RSKNLSK

SEQ ID NO: 16873 - protein, 7 aa, ARTIFICIAL SEQUENCE
  Synthetic Construct
RSKNLTK

SEQ ID NO: 16874 - protein, 7 aa, ARTIFICIAL SEQUENCE
  Synthetic Construct
RSKNLYK

SEQ ID NO: 16875 - protein, 7 aa, ARTIFICIAL SEQUENCE
  Synthetic Construct
RSKNNAK

SEQ ID NO: 16876 - protein, 7 aa, ARTIFICIAL SEQUENCE
  Synthetic Construct
RSKNNDK

SEQ ID NO: 16877 - protein, 7 aa, ARTIFICIAL SEQUENCE
  Synthetic Construct
RSKNNEK

SEQ ID NO: 16878 - protein, 7 aa, ARTIFICIAL SEQUENCE
  Synthetic Construct
RSKNNFK

SEQ ID NO: 16879 - protein, 7 aa, ARTIFICIAL SEQUENCE
  Synthetic Construct
RSKNNGK

SEQ ID NO: 16880 - protein, 7 aa, ARTIFICIAL SEQUENCE
  Synthetic Construct
RSKNNHK

SEQ ID NO: 16881 - protein, 7 aa, ARTIFICIAL SEQUENCE
  Synthetic Construct
RSKNNIK

SEQ ID NO: 16882 - protein, 7 aa, ARTIFICIAL SEQUENCE
  Synthetic Construct
RSKNNLK

SEQ ID NO: 16883 - protein, 7 aa, ARTIFICIAL SEQUENCE
  Synthetic Construct
RSKNNNK

SEQ ID NO: 16884 - protein, 7 aa, ARTIFICIAL SEQUENCE
  Synthetic Construct
RSKNNQK

SEQ ID NO: 16885 - protein, 7 aa, ARTIFICIAL SEQUENCE
  Synthetic Construct
RSKNNRK

SEQ ID NO: 16886 - protein, 7 aa, ARTIFICIAL SEQUENCE
  Synthetic Construct
RSKNNSK

SEQ ID NO: 16887 - protein, 7 aa, ARTIFICIAL SEQUENCE
  Synthetic Construct
RSKNNTK

SEQ ID NO: 16888 - protein, 7 aa, ARTIFICIAL SEQUENCE
  Synthetic Construct
RSKNNYK

SEQ ID NO: 16889 - protein, 7 aa, ARTIFICIAL SEQUENCE
  Synthetic Construct
RSKNQAK

SEQ ID NO: 16890 - protein, 7 aa, ARTIFICIAL SEQUENCE
  Synthetic Construct
RSKNQDK

SEQ ID NO: 16891 - protein, 7 aa, ARTIFICIAL SEQUENCE
  Synthetic Construct
RSKNQEK

SEQ ID NO: 16892 - protein, 7 aa, ARTIFICIAL SEQUENCE
  Synthetic Construct
RSKNQFK

SEQ ID NO: 16893 - protein, 7 aa, ARTIFICIAL SEQUENCE
  Synthetic Construct
RSKNQGK

SEQ ID NO: 16894 - protein, 7 aa, ARTIFICIAL SEQUENCE
  Synthetic Construct
RSKNQHK

SEQ ID NO: 16895 - protein, 7 aa, ARTIFICIAL SEQUENCE
  Synthetic Construct
RSKNQIK

SEQ ID NO: 16896 - protein, 7 aa, ARTIFICIAL SEQUENCE
  Synthetic Construct
RSKNQLK

SEQ ID NO: 16897 - protein, 7 aa, ARTIFICIAL SEQUENCE
  Synthetic Construct
RSKNQNK

SEQ ID NO: 16898 - protein, 7 aa, ARTIFICIAL SEQUENCE
  Synthetic Construct
RSKNQQK

SEQ ID NO: 16899 - protein, 7 aa, ARTIFICIAL SEQUENCE
  Synthetic Construct
RSKNQRK

SEQ ID NO: 16900 - protein, 7 aa, ARTIFICIAL SEQUENCE
  Synthetic Construct
RSKNQSK

SEQ ID NO: 16901 - protein, 7 aa, ARTIFICIAL SEQUENCE
  Synthetic Construct
RSKNQTK

SEQ ID NO: 16902 - protein, 7 aa, ARTIFICIAL SEQUENCE
  Synthetic Construct
RSKNQYK

SEQ ID NO: 16903 - protein, 7 aa, ARTIFICIAL SEQUENCE
  Synthetic Construct
RSKNRAK

SEQ ID NO: 16904 - protein, 7 aa, ARTIFICIAL SEQUENCE
  Synthetic Construct
RSKNRDK

SEQ ID NO: 16905 - protein, 7 aa, ARTIFICIAL SEQUENCE
  Synthetic Construct
RSKNREK

SEQ ID NO: 16906 - protein, 7 aa, ARTIFICIAL SEQUENCE
  Synthetic Construct
RSKNRFK

SEQ ID NO: 16907 - protein, 7 aa, ARTIFICIAL SEQUENCE
  Synthetic Construct
RSKNRGK

SEQ ID NO: 16908 - protein, 7 aa, ARTIFICIAL SEQUENCE
  Synthetic Construct
RSKNRHK

SEQ ID NO: 16909 - protein, 7 aa, ARTIFICIAL SEQUENCE
  Synthetic Construct
RSKNRIK

SEQ ID NO: 16910 - protein, 7 aa, ARTIFICIAL SEQUENCE
  Synthetic Construct
RSKNRLK

SEQ ID NO: 16911 - protein, 7 aa, ARTIFICIAL SEQUENCE
  Synthetic Construct
RSKNRNK

SEQ ID NO: 16912 - protein, 7 aa, ARTIFICIAL SEQUENCE
  Synthetic Construct
RSKNRQK

SEQ ID NO: 16913 - protein, 7 aa, ARTIFICIAL SEQUENCE
  Synthetic Construct
RSKNRRK

SEQ ID NO: 16914 - protein, 7 aa, ARTIFICIAL SEQUENCE
  Synthetic Construct
RSKNRSK

SEQ ID NO: 16915 - protein, 7 aa, ARTIFICIAL SEQUENCE
  Synthetic Construct
RSKNRTK

SEQ ID NO: 16916 - protein, 7 aa, ARTIFICIAL SEQUENCE
  Synthetic Construct
RSKNRYK

SEQ ID NO: 16917 - protein, 7 aa, ARTIFICIAL SEQUENCE
  Synthetic Construct
RSKNSAK

SEQ ID NO: 16918 - protein, 7 aa, ARTIFICIAL SEQUENCE
  Synthetic Construct
RSKNSDK

SEQ ID NO: 16919 - protein, 7 aa, ARTIFICIAL SEQUENCE
  Synthetic Construct
RSKNSEK

SEQ ID NO: 16920 - protein, 7 aa, ARTIFICIAL SEQUENCE
  Synthetic Construct
RSKNSFK

SEQ ID NO: 16921 - protein, 7 aa, ARTIFICIAL SEQUENCE
  Synthetic Construct
RSKNSGK

SEQ ID NO: 16922 - protein, 7 aa, ARTIFICIAL SEQUENCE
  Synthetic Construct
RSKNSHK

SEQ ID NO: 16923 - protein, 7 aa, ARTIFICIAL SEQUENCE
  Synthetic Construct
RSKNSIK

SEQ ID NO: 16924 - protein, 7 aa, ARTIFICIAL SEQUENCE
  Synthetic Construct
RSKNSLK

SEQ ID NO: 16925 - protein, 7 aa, ARTIFICIAL SEQUENCE
  Synthetic Construct
RSKNSNK

SEQ ID NO: 16926 - protein, 7 aa, ARTIFICIAL SEQUENCE
  Synthetic Construct
RSKNSQK

SEQ ID NO: 16927 - protein, 7 aa, ARTIFICIAL SEQUENCE
  Synthetic Construct
RSKNSRK

SEQ ID NO: 16928 - protein, 7 aa, ARTIFICIAL SEQUENCE
  Synthetic Construct
RSKNSSK

SEQ ID NO: 16929 - protein, 7 aa, ARTIFICIAL SEQUENCE
  Synthetic Construct
RSKNSTK

SEQ ID NO: 16930 - protein, 7 aa, ARTIFICIAL SEQUENCE
  Synthetic Construct
RSKNSYK

SEQ ID NO: 16931 - protein, 7 aa, ARTIFICIAL SEQUENCE
  Synthetic Construct
RSKNTAK

SEQ ID NO: 16932 - protein, 7 aa, ARTIFICIAL SEQUENCE
  Synthetic Construct
RSKNTDK

SEQ ID NO: 16933 - protein, 7 aa, ARTIFICIAL SEQUENCE
  Synthetic Construct
RSKNTEK

SEQ ID NO: 16934 - protein, 7 aa, ARTIFICIAL SEQUENCE
  Synthetic Construct
RSKNTFK

SEQ ID NO: 16935 - protein, 7 aa, ARTIFICIAL SEQUENCE
  Synthetic Construct
RSKNTGK

SEQ ID NO: 16936 - protein, 7 aa, ARTIFICIAL SEQUENCE
  Synthetic Construct
RSKNTHK

SEQ ID NO: 16937 - protein, 7 aa, ARTIFICIAL SEQUENCE
  Synthetic Construct
RSKNTIK

SEQ ID NO: 16938 - protein, 7 aa, ARTIFICIAL SEQUENCE
  Synthetic Construct
RSKNTLK

SEQ ID NO: 16939 - protein, 7 aa, ARTIFICIAL SEQUENCE
  Synthetic Construct
RSKNTNK

SEQ ID NO: 16940 - protein, 7 aa, ARTIFICIAL SEQUENCE
  Synthetic Construct
RSKNTQK

SEQ ID NO: 16941 - protein, 7 aa, ARTIFICIAL SEQUENCE
  Synthetic Construct
RSKNTRK

SEQ ID NO: 16942 - protein, 7 aa, ARTIFICIAL SEQUENCE
  Synthetic Construct
RSKNTSK

SEQ ID NO: 16943 - protein, 7 aa, ARTIFICIAL SEQUENCE
  Synthetic Construct
RSKNTTK

SEQ ID NO: 16944 - protein, 7 aa, ARTIFICIAL SEQUENCE
  Synthetic Construct
RSKNTYK

SEQ ID NO: 16945 - protein, 7 aa, ARTIFICIAL SEQUENCE
  Synthetic Construct
RSKNYAK

SEQ ID NO: 16946 - protein, 7 aa, ARTIFICIAL SEQUENCE
  Synthetic Construct
RSKNYDK

SEQ ID NO: 16947 - protein, 7 aa, ARTIFICIAL SEQUENCE
  Synthetic Construct
RSKNYEK

SEQ ID NO: 16948 - protein, 7 aa, ARTIFICIAL SEQUENCE
  Synthetic Construct
RSKNYFK

SEQ ID NO: 16949 - protein, 7 aa, ARTIFICIAL SEQUENCE
  Synthetic Construct
RSKNYGK

SEQ ID NO: 16950 - protein, 7 aa, ARTIFICIAL SEQUENCE
  Synthetic Construct
RSKNYHK

SEQ ID NO: 16951 - protein, 7 aa, ARTIFICIAL SEQUENCE
  Synthetic Construct
RSKNYIK

SEQ ID NO: 16952 - protein, 7 aa, ARTIFICIAL SEQUENCE
  Synthetic Construct
RSKNYLK

SEQ ID NO: 16953 - protein, 7 aa, ARTIFICIAL SEQUENCE
  Synthetic Construct
RSKNYNK

SEQ ID NO: 16954 - protein, 7 aa, ARTIFICIAL SEQUENCE
  Synthetic Construct
RSKNYQK

SEQ ID NO: 16955 - protein, 7 aa, ARTIFICIAL SEQUENCE
  Synthetic Construct
RSKNYRK

SEQ ID NO: 16956 - protein, 7 aa, ARTIFICIAL SEQUENCE
  Synthetic Construct
RSKNYSK

SEQ ID NO: 16957 - protein, 7 aa, ARTIFICIAL SEQUENCE
  Synthetic Construct
RSKNYTK

SEQ ID NO: 16958 - protein, 7 aa, ARTIFICIAL SEQUENCE
  Synthetic Construct
RSKNYYK

SEQ ID NO: 16959 - protein, 7 aa, ARTIFICIAL SEQUENCE
  Synthetic Construct
RSKPAAK

SEQ ID NO: 16960 - protein, 7 aa, ARTIFICIAL SEQUENCE
  Synthetic Construct
RSKPADK

SEQ ID NO: 16961 - protein, 7 aa, ARTIFICIAL SEQUENCE
  Synthetic Construct
RSKPAEK

SEQ ID NO: 16962 - protein, 7 aa, ARTIFICIAL SEQUENCE
  Synthetic Construct
RSKPAFK

SEQ ID NO: 16963 - protein, 7 aa, ARTIFICIAL SEQUENCE
  Synthetic Construct
RSKPAGK

SEQ ID NO: 16964 - protein, 7 aa, ARTIFICIAL SEQUENCE
  Synthetic Construct
RSKPAHK

SEQ ID NO: 16965 - protein, 7 aa, ARTIFICIAL SEQUENCE
  Synthetic Construct
RSKPAIK

SEQ ID NO: 16966 - protein, 7 aa, ARTIFICIAL SEQUENCE
  Synthetic Construct
RSKPALK

SEQ ID NO: 16967 - protein, 7 aa, ARTIFICIAL SEQUENCE
  Synthetic Construct
RSKPANK

SEQ ID NO: 16968 - protein, 7 aa, ARTIFICIAL SEQUENCE
  Synthetic Construct
RSKPAQK

SEQ ID NO: 16969 - protein, 7 aa, ARTIFICIAL SEQUENCE
  Synthetic Construct
RSKPARK

SEQ ID NO: 16970 - protein, 7 aa, ARTIFICIAL SEQUENCE
  Synthetic Construct
RSKPASK

SEQ ID NO: 16971 - protein, 7 aa, ARTIFICIAL SEQUENCE
  Synthetic Construct
RSKPATK

SEQ ID NO: 16972 - protein, 7 aa, ARTIFICIAL SEQUENCE
  Synthetic Construct
RSKPAYK

SEQ ID NO: 16973 - protein, 7 aa, ARTIFICIAL SEQUENCE
  Synthetic Construct
RSKPDAK

SEQ ID NO: 16974 - protein, 7 aa, ARTIFICIAL SEQUENCE
  Synthetic Construct
RSKPDDK

SEQ ID NO: 16975 - protein, 7 aa, ARTIFICIAL SEQUENCE
  Synthetic Construct
RSKPDEK

SEQ ID NO: 16976 - protein, 7 aa, ARTIFICIAL SEQUENCE
  Synthetic Construct
RSKPDFK

SEQ ID NO: 16977 - protein, 7 aa, ARTIFICIAL SEQUENCE
  Synthetic Construct
RSKPDGK

SEQ ID NO: 16978 - protein, 7 aa, ARTIFICIAL SEQUENCE
  Synthetic Construct
RSKPDHK

SEQ ID NO: 16979 - protein, 7 aa, ARTIFICIAL SEQUENCE
  Synthetic Construct
RSKPDIK

SEQ ID NO: 16980 - protein, 7 aa, ARTIFICIAL SEQUENCE
  Synthetic Construct
RSKPDLK

SEQ ID NO: 16981 - protein, 7 aa, ARTIFICIAL SEQUENCE
  Synthetic Construct
RSKPDNK

SEQ ID NO: 16982 - protein, 7 aa, ARTIFICIAL SEQUENCE
  Synthetic Construct
RSKPDQK

SEQ ID NO: 16983 - protein, 7 aa, ARTIFICIAL SEQUENCE
  Synthetic Construct
RSKPDRK

SEQ ID NO: 16984 - protein, 7 aa, ARTIFICIAL SEQUENCE
  Synthetic Construct
RSKPDSK

SEQ ID NO: 16985 - protein, 7 aa, ARTIFICIAL SEQUENCE
  Synthetic Construct
RSKPDTK

SEQ ID NO: 16986 - protein, 7 aa, ARTIFICIAL SEQUENCE
  Synthetic Construct
RSKPDYK

SEQ ID NO: 16987 - protein, 7 aa, ARTIFICIAL SEQUENCE
  Synthetic Construct
RSKPEAK

SEQ ID NO: 16988 - protein, 7 aa, ARTIFICIAL SEQUENCE
  Synthetic Construct
RSKPEDK

SEQ ID NO: 16989 - protein, 7 aa, ARTIFICIAL SEQUENCE
  Synthetic Construct
RSKPEEK

SEQ ID NO: 16990 - protein, 7 aa, ARTIFICIAL SEQUENCE
  Synthetic Construct
RSKPEFK

SEQ ID NO: 16991 - protein, 7 aa, ARTIFICIAL SEQUENCE
  Synthetic Construct
RSKPEGK

SEQ ID NO: 16992 - protein, 7 aa, ARTIFICIAL SEQUENCE
  Synthetic Construct
RSKPEHK

SEQ ID NO: 16993 - protein, 7 aa, ARTIFICIAL SEQUENCE
  Synthetic Construct
RSKPEIK

SEQ ID NO: 16994 - protein, 7 aa, ARTIFICIAL SEQUENCE
  Synthetic Construct
RSKPELK

SEQ ID NO: 16995 - protein, 7 aa, ARTIFICIAL SEQUENCE
  Synthetic Construct
RSKPENK

SEQ ID NO: 16996 - protein, 7 aa, ARTIFICIAL SEQUENCE
  Synthetic Construct
RSKPEQK

SEQ ID NO: 16997 - protein, 7 aa, ARTIFICIAL SEQUENCE
  Synthetic Construct
RSKPERK

SEQ ID NO: 16998 - protein, 7 aa, ARTIFICIAL SEQUENCE
  Synthetic Construct
RSKPESK

SEQ ID NO: 16999 - protein, 7 aa, ARTIFICIAL SEQUENCE
  Synthetic Construct
RSKPETK

SEQ ID NO: 17000 - protein, 7 aa, ARTIFICIAL SEQUENCE
  Synthetic Construct
RSKPEYK

SEQ ID NO: 17001 - protein, 7 aa, ARTIFICIAL SEQUENCE
  Synthetic Construct
RSKPFAK

SEQ ID NO: 17002 - protein, 7 aa, ARTIFICIAL SEQUENCE
  Synthetic Construct
RSKPFDK

SEQ ID NO: 17003 - protein, 7 aa, ARTIFICIAL SEQUENCE
  Synthetic Construct
RSKPFEK

SEQ ID NO: 17004 - protein, 7 aa, ARTIFICIAL SEQUENCE
  Synthetic Construct
RSKPFFK

SEQ ID NO: 17005 - protein, 7 aa, ARTIFICIAL SEQUENCE
  Synthetic Construct
RSKPFGK

SEQ ID NO: 17006 - protein, 7 aa, ARTIFICIAL SEQUENCE
  Synthetic Construct
RSKPFHK

SEQ ID NO: 17007 - protein, 7 aa, ARTIFICIAL SEQUENCE
  Synthetic Construct
RSKPFIK

SEQ ID NO: 17008 - protein, 7 aa, ARTIFICIAL SEQUENCE
  Synthetic Construct
RSKPFLK

SEQ ID NO: 17009 - protein, 7 aa, ARTIFICIAL SEQUENCE
  Synthetic Construct
RSKPFNK

SEQ ID NO: 17010 - protein, 7 aa, ARTIFICIAL SEQUENCE
  Synthetic Construct
RSKPFQK

SEQ ID NO: 17011 - protein, 7 aa, ARTIFICIAL SEQUENCE
  Synthetic Construct
RSKPFRK

SEQ ID NO: 17012 - protein, 7 aa, ARTIFICIAL SEQUENCE
  Synthetic Construct
RSKPFSK

SEQ ID NO: 17013 - protein, 7 aa, ARTIFICIAL SEQUENCE
  Synthetic Construct
RSKPFTK

SEQ ID NO: 17014 - protein, 7 aa, ARTIFICIAL SEQUENCE
  Synthetic Construct
RSKPFYK

SEQ ID NO: 17015 - protein, 7 aa, ARTIFICIAL SEQUENCE
  Synthetic Construct
RSKPGAK

SEQ ID NO: 17016 - protein, 7 aa, ARTIFICIAL SEQUENCE
  Synthetic Construct
RSKPGDK

SEQ ID NO: 17017 - protein, 7 aa, ARTIFICIAL SEQUENCE
  Synthetic Construct
RSKPGEK

SEQ ID NO: 17018 - protein, 7 aa, ARTIFICIAL SEQUENCE
  Synthetic Construct
RSKPGFK

SEQ ID NO: 17019 - protein, 7 aa, ARTIFICIAL SEQUENCE
  Synthetic Construct
RSKPGGK

SEQ ID NO: 17020 - protein, 7 aa, ARTIFICIAL SEQUENCE
  Synthetic Construct
RSKPGHK

SEQ ID NO: 17021 - protein, 7 aa, ARTIFICIAL SEQUENCE
  Synthetic Construct
RSKPGIK

SEQ ID NO: 17022 - protein, 7 aa, ARTIFICIAL SEQUENCE
  Synthetic Construct
RSKPGLK

SEQ ID NO: 17023 - protein, 7 aa, ARTIFICIAL SEQUENCE
  Synthetic Construct
RSKPGNK

SEQ ID NO: 17024 - protein, 7 aa, ARTIFICIAL SEQUENCE
  Synthetic Construct
RSKPGQK

SEQ ID NO: 17025 - protein, 7 aa, ARTIFICIAL SEQUENCE
  Synthetic Construct
RSKPGRK

SEQ ID NO: 17026 - protein, 7 aa, ARTIFICIAL SEQUENCE
  Synthetic Construct
RSKPGSK

SEQ ID NO: 17027 - protein, 7 aa, ARTIFICIAL SEQUENCE
  Synthetic Construct
RSKPGTK

SEQ ID NO: 17028 - protein, 7 aa, ARTIFICIAL SEQUENCE
  Synthetic Construct
RSKPGYK

SEQ ID NO: 17029 - protein, 7 aa, ARTIFICIAL SEQUENCE
  Synthetic Construct
RSKPHAK

SEQ ID NO: 17030 - protein, 7 aa, ARTIFICIAL SEQUENCE
  Synthetic Construct
RSKPHDK

SEQ ID NO: 17031 - protein, 7 aa, ARTIFICIAL SEQUENCE
  Synthetic Construct
RSKPHEK

SEQ ID NO: 17032 - protein, 7 aa, ARTIFICIAL SEQUENCE
  Synthetic Construct
RSKPHFK

SEQ ID NO: 17033 - protein, 7 aa, ARTIFICIAL SEQUENCE
  Synthetic Construct
RSKPHGK

SEQ ID NO: 17034 - protein, 7 aa, ARTIFICIAL SEQUENCE
  Synthetic Construct
RSKPHHK

SEQ ID NO: 17035 - protein, 7 aa, ARTIFICIAL SEQUENCE
  Synthetic Construct
RSKPHIK

SEQ ID NO: 17036 - protein, 7 aa, ARTIFICIAL SEQUENCE
  Synthetic Construct
RSKPHLK

SEQ ID NO: 17037 - protein, 7 aa, ARTIFICIAL SEQUENCE
  Synthetic Construct
RSKPHNK

SEQ ID NO: 17038 - protein, 7 aa, ARTIFICIAL SEQUENCE
  Synthetic Construct
RSKPHQK

SEQ ID NO: 17039 - protein, 7 aa, ARTIFICIAL SEQUENCE
  Synthetic Construct
RSKPHRK

SEQ ID NO: 17040 - protein, 7 aa, ARTIFICIAL SEQUENCE
  Synthetic Construct
RSKPHSK

SEQ ID NO: 17041 - protein, 7 aa, ARTIFICIAL SEQUENCE
  Synthetic Construct
RSKPHTK

SEQ ID NO: 17042 - protein, 7 aa, ARTIFICIAL SEQUENCE
  Synthetic Construct
RSKPHYK

SEQ ID NO: 17043 - protein, 7 aa, ARTIFICIAL SEQUENCE
  Synthetic Construct
RSKPIAK

SEQ ID NO: 17044 - protein, 7 aa, ARTIFICIAL SEQUENCE
  Synthetic Construct
RSKPIDK

SEQ ID NO: 17045 - protein, 7 aa, ARTIFICIAL SEQUENCE
  Synthetic Construct
RSKPIEK

SEQ ID NO: 17046 - protein, 7 aa, ARTIFICIAL SEQUENCE
  Synthetic Construct
RSKPIFK

SEQ ID NO: 17047 - protein, 7 aa, ARTIFICIAL SEQUENCE
  Synthetic Construct
RSKPIGK

SEQ ID NO: 17048 - protein, 7 aa, ARTIFICIAL SEQUENCE
  Synthetic Construct
RSKPIHK

SEQ ID NO: 17049 - protein, 7 aa, ARTIFICIAL SEQUENCE
  Synthetic Construct
RSKPIIK

SEQ ID NO: 17050 - protein, 7 aa, ARTIFICIAL SEQUENCE
  Synthetic Construct
RSKPILK

SEQ ID NO: 17051 - protein, 7 aa, ARTIFICIAL SEQUENCE
  Synthetic Construct
RSKPINK

SEQ ID NO: 17052 - protein, 7 aa, ARTIFICIAL SEQUENCE
  Synthetic Construct
RSKPIQK

SEQ ID NO: 17053 - protein, 7 aa, ARTIFICIAL SEQUENCE
  Synthetic Construct
RSKPIRK

SEQ ID NO: 17054 - protein, 7 aa, ARTIFICIAL SEQUENCE
  Synthetic Construct
RSKPISK

SEQ ID NO: 17055 - protein, 7 aa, ARTIFICIAL SEQUENCE
  Synthetic Construct
RSKPITK

SEQ ID NO: 17056 - protein, 7 aa, ARTIFICIAL SEQUENCE
  Synthetic Construct
RSKPIYK

SEQ ID NO: 17057 - protein, 7 aa, ARTIFICIAL SEQUENCE
  Synthetic Construct
RSKPLAK

SEQ ID NO: 17058 - protein, 7 aa, ARTIFICIAL SEQUENCE
  Synthetic Construct
RSKPLDK

SEQ ID NO: 17059 - protein, 7 aa, ARTIFICIAL SEQUENCE
  Synthetic Construct
RSKPLEK

SEQ ID NO: 17060 - protein, 7 aa, ARTIFICIAL SEQUENCE
  Synthetic Construct
RSKPLFK

SEQ ID NO: 17061 - protein, 7 aa, ARTIFICIAL SEQUENCE
  Synthetic Construct
RSKPLGK

SEQ ID NO: 17062 - protein, 7 aa, ARTIFICIAL SEQUENCE
  Synthetic Construct
RSKPLHK

SEQ ID NO: 17063 - protein, 7 aa, ARTIFICIAL SEQUENCE
  Synthetic Construct
RSKPLIK

SEQ ID NO: 17064 - protein, 7 aa, ARTIFICIAL SEQUENCE
  Synthetic Construct
RSKPLLK

SEQ ID NO: 17065 - protein, 7 aa, ARTIFICIAL SEQUENCE
  Synthetic Construct
RSKPLNK

SEQ ID NO: 17066 - protein, 7 aa, ARTIFICIAL SEQUENCE
  Synthetic Construct
RSKPLQK

SEQ ID NO: 17067 - protein, 7 aa, ARTIFICIAL SEQUENCE
  Synthetic Construct
RSKPLRK

SEQ ID NO: 17068 - protein, 7 aa, ARTIFICIAL SEQUENCE
  Synthetic Construct
RSKPLSK

SEQ ID NO: 17069 - protein, 7 aa, ARTIFICIAL SEQUENCE
  Synthetic Construct
RSKPLTK

SEQ ID NO: 17070 - protein, 7 aa, ARTIFICIAL SEQUENCE
  Synthetic Construct
RSKPLYK

SEQ ID NO: 17071 - protein, 7 aa, ARTIFICIAL SEQUENCE
  Synthetic Construct
RSKPNAK

SEQ ID NO: 17072 - protein, 7 aa, ARTIFICIAL SEQUENCE
  Synthetic Construct
RSKPNDK

SEQ ID NO: 17073 - protein, 7 aa, ARTIFICIAL SEQUENCE
  Synthetic Construct
RSKPNEK

SEQ ID NO: 17074 - protein, 7 aa, ARTIFICIAL SEQUENCE
  Synthetic Construct
RSKPNFK

SEQ ID NO: 17075 - protein, 7 aa, ARTIFICIAL SEQUENCE
  Synthetic Construct
RSKPNGK

SEQ ID NO: 17076 - protein, 7 aa, ARTIFICIAL SEQUENCE
  Synthetic Construct
RSKPNHK

SEQ ID NO: 17077 - protein, 7 aa, ARTIFICIAL SEQUENCE
  Synthetic Construct
RSKPNIK

SEQ ID NO: 17078 - protein, 7 aa, ARTIFICIAL SEQUENCE
  Synthetic Construct
RSKPNLK

SEQ ID NO: 17079 - protein, 7 aa, ARTIFICIAL SEQUENCE
  Synthetic Construct
RSKPNNK

SEQ ID NO: 17080 - protein, 7 aa, ARTIFICIAL SEQUENCE
  Synthetic Construct
RSKPNQK

SEQ ID NO: 17081 - protein, 7 aa, ARTIFICIAL SEQUENCE
  Synthetic Construct
RSKPNRK

SEQ ID NO: 17082 - protein, 7 aa, ARTIFICIAL SEQUENCE
  Synthetic Construct
RSKPNSK

SEQ ID NO: 17083 - protein, 7 aa, ARTIFICIAL SEQUENCE
  Synthetic Construct
RSKPNTK

SEQ ID NO: 17084 - protein, 7 aa, ARTIFICIAL SEQUENCE
  Synthetic Construct
RSKPNYK

SEQ ID NO: 17085 - protein, 7 aa, ARTIFICIAL SEQUENCE
  Synthetic Construct
RSKPQAK

SEQ ID NO: 17086 - protein, 7 aa, ARTIFICIAL SEQUENCE
  Synthetic Construct
RSKPQDK

SEQ ID NO: 17087 - protein, 7 aa, ARTIFICIAL SEQUENCE
  Synthetic Construct
RSKPQEK

SEQ ID NO: 17088 - protein, 7 aa, ARTIFICIAL SEQUENCE
  Synthetic Construct
RSKPQFK

SEQ ID NO: 17089 - protein, 7 aa, ARTIFICIAL SEQUENCE
  Synthetic Construct
RSKPQGK

SEQ ID NO: 17090 - protein, 7 aa, ARTIFICIAL SEQUENCE
  Synthetic Construct
RSKPQHK

SEQ ID NO: 17091 - protein, 7 aa, ARTIFICIAL SEQUENCE
  Synthetic Construct
RSKPQIK

SEQ ID NO: 17092 - protein, 7 aa, ARTIFICIAL SEQUENCE
  Synthetic Construct
RSKPQLK

SEQ ID NO: 17093 - protein, 7 aa, ARTIFICIAL SEQUENCE
  Synthetic Construct
RSKPQNK

SEQ ID NO: 17094 - protein, 7 aa, ARTIFICIAL SEQUENCE
  Synthetic Construct
RSKPQQK

SEQ ID NO: 17095 - protein, 7 aa, ARTIFICIAL SEQUENCE
  Synthetic Construct
RSKPQRK

SEQ ID NO: 17096 - protein, 7 aa, ARTIFICIAL SEQUENCE
  Synthetic Construct
RSKPQSK

SEQ ID NO: 17097 - protein, 7 aa, ARTIFICIAL SEQUENCE
  Synthetic Construct
RSKPQTK

SEQ ID NO: 17098 - protein, 7 aa, ARTIFICIAL SEQUENCE
  Synthetic Construct
RSKPQYK

SEQ ID NO: 17099 - protein, 7 aa, ARTIFICIAL SEQUENCE
  Synthetic Construct
RSKPRAK

SEQ ID NO: 17100 - protein, 7 aa, ARTIFICIAL SEQUENCE
  Synthetic Construct
RSKPRDK

SEQ ID NO: 17101 - protein, 7 aa, ARTIFICIAL SEQUENCE
  Synthetic Construct
RSKPREK

SEQ ID NO: 17102 - protein, 7 aa, ARTIFICIAL SEQUENCE
  Synthetic Construct
RSKPRFK

SEQ ID NO: 17103 - protein, 7 aa, ARTIFICIAL SEQUENCE
  Synthetic Construct
RSKPRGK

SEQ ID NO: 17104 - protein, 7 aa, ARTIFICIAL SEQUENCE
  Synthetic Construct
RSKPRHK

SEQ ID NO: 17105 - protein, 7 aa, ARTIFICIAL SEQUENCE
  Synthetic Construct
RSKPRIK

SEQ ID NO: 17106 - protein, 7 aa, ARTIFICIAL SEQUENCE
  Synthetic Construct
RSKPRLK

SEQ ID NO: 17107 - protein, 7 aa, ARTIFICIAL SEQUENCE
  Synthetic Construct
RSKPRNK

SEQ ID NO: 17108 - protein, 7 aa, ARTIFICIAL SEQUENCE
  Synthetic Construct
RSKPRQK

SEQ ID NO: 17109 - protein, 7 aa, ARTIFICIAL SEQUENCE
  Synthetic Construct
RSKPRRK

SEQ ID NO: 17110 - protein, 7 aa, ARTIFICIAL SEQUENCE
  Synthetic Construct
RSKPRSK

SEQ ID NO: 17111 - protein, 7 aa, ARTIFICIAL SEQUENCE
  Synthetic Construct
RSKPRTK

SEQ ID NO: 17112 - protein, 7 aa, ARTIFICIAL SEQUENCE
  Synthetic Construct
RSKPRYK

SEQ ID NO: 17113 - protein, 7 aa, ARTIFICIAL SEQUENCE
  Synthetic Construct
RSKPSAK

SEQ ID NO: 17114 - protein, 7 aa, ARTIFICIAL SEQUENCE
  Synthetic Construct
RSKPSDK

SEQ ID NO: 17115 - protein, 7 aa, ARTIFICIAL SEQUENCE
  Synthetic Construct
RSKPSEK

SEQ ID NO: 17116 - protein, 7 aa, ARTIFICIAL SEQUENCE
  Synthetic Construct
RSKPSFK

SEQ ID NO: 17117 - protein, 7 aa, ARTIFICIAL SEQUENCE
  Synthetic Construct
RSKPSGK

SEQ ID NO: 17118 - protein, 7 aa, ARTIFICIAL SEQUENCE
  Synthetic Construct
RSKPSHK

SEQ ID NO: 17119 - protein, 7 aa, ARTIFICIAL SEQUENCE
  Synthetic Construct
RSKPSIK

SEQ ID NO: 17120 - protein, 7 aa, ARTIFICIAL SEQUENCE
  Synthetic Construct
RSKPSLK

SEQ ID NO: 17121 - protein, 7 aa, ARTIFICIAL SEQUENCE
  Synthetic Construct
RSKPSNK

SEQ ID NO: 17122 - protein, 7 aa, ARTIFICIAL SEQUENCE
  Synthetic Construct
RSKPSQK

SEQ ID NO: 17123 - protein, 7 aa, ARTIFICIAL SEQUENCE
  Synthetic Construct
RSKPSRK

SEQ ID NO: 17124 - protein, 7 aa, ARTIFICIAL SEQUENCE
  Synthetic Construct
RSKPSSK

SEQ ID NO: 17125 - protein, 7 aa, ARTIFICIAL SEQUENCE
  Synthetic Construct
RSKPSTK

SEQ ID NO: 17126 - protein, 7 aa, ARTIFICIAL SEQUENCE
  Synthetic Construct
RSKPSYK

SEQ ID NO: 17127 - protein, 7 aa, ARTIFICIAL SEQUENCE
  Synthetic Construct
RSKPTAK

SEQ ID NO: 17128 - protein, 7 aa, ARTIFICIAL SEQUENCE
  Synthetic Construct
RSKPTDK

SEQ ID NO: 17129 - protein, 7 aa, ARTIFICIAL SEQUENCE
  Synthetic Construct
RSKPTEK

SEQ ID NO: 17130 - protein, 7 aa, ARTIFICIAL SEQUENCE
  Synthetic Construct
RSKPTFK

SEQ ID NO: 17131 - protein, 7 aa, ARTIFICIAL SEQUENCE
  Synthetic Construct
RSKPTGK

SEQ ID NO: 17132 - protein, 7 aa, ARTIFICIAL SEQUENCE
  Synthetic Construct
RSKPTHK

SEQ ID NO: 17133 - protein, 7 aa, ARTIFICIAL SEQUENCE
  Synthetic Construct
RSKPTIK

SEQ ID NO: 17134 - protein, 7 aa, ARTIFICIAL SEQUENCE
  Synthetic Construct
RSKPTLK

SEQ ID NO: 17135 - protein, 7 aa, ARTIFICIAL SEQUENCE
  Synthetic Construct
RSKPTNK

SEQ ID NO: 17136 - protein, 7 aa, ARTIFICIAL SEQUENCE
  Synthetic Construct
RSKPTQK

SEQ ID NO: 17137 - protein, 7 aa, ARTIFICIAL SEQUENCE
  Synthetic Construct
RSKPTRK

SEQ ID NO: 17138 - protein, 7 aa, ARTIFICIAL SEQUENCE
  Synthetic Construct
RSKPTSK

SEQ ID NO: 17139 - protein, 7 aa, ARTIFICIAL SEQUENCE
  Synthetic Construct
RSKPTTK

SEQ ID NO: 17140 - protein, 7 aa, ARTIFICIAL SEQUENCE
  Synthetic Construct
RSKPTYK

SEQ ID NO: 17141 - protein, 7 aa, ARTIFICIAL SEQUENCE
  Synthetic Construct
RSKPYAK

SEQ ID NO: 17142 - protein, 7 aa, ARTIFICIAL SEQUENCE
  Synthetic Construct
RSKPYDK

SEQ ID NO: 17143 - protein, 7 aa, ARTIFICIAL SEQUENCE
  Synthetic Construct
RSKPYEK

SEQ ID NO: 17144 - protein, 7 aa, ARTIFICIAL SEQUENCE
  Synthetic Construct
RSKPYFK

SEQ ID NO: 17145 - protein, 7 aa, ARTIFICIAL SEQUENCE
  Synthetic Construct
RSKPYGK

SEQ ID NO: 17146 - protein, 7 aa, ARTIFICIAL SEQUENCE
  Synthetic Construct
RSKPYHK

SEQ ID NO: 17147 - protein, 7 aa, ARTIFICIAL SEQUENCE
  Synthetic Construct
RSKPYIK

SEQ ID NO: 17148 - protein, 7 aa, ARTIFICIAL SEQUENCE
  Synthetic Construct
RSKPYLK

SEQ ID NO: 17149 - protein, 7 aa, ARTIFICIAL SEQUENCE
  Synthetic Construct
RSKPYNK

SEQ ID NO: 17150 - protein, 7 aa, ARTIFICIAL SEQUENCE
  Synthetic Construct
RSKPYQK

SEQ ID NO: 17151 - protein, 7 aa, ARTIFICIAL SEQUENCE
  Synthetic Construct
RSKPYRK

SEQ ID NO: 17152 - protein, 7 aa, ARTIFICIAL SEQUENCE
  Synthetic Construct
RSKPYSK

SEQ ID NO: 17153 - protein, 7 aa, ARTIFICIAL SEQUENCE
  Synthetic Construct
RSKPYTK

SEQ ID NO: 17154 - protein, 7 aa, ARTIFICIAL SEQUENCE
  Synthetic Construct
RSKPYYK

SEQ ID NO: 17155 - protein, 7 aa, ARTIFICIAL SEQUENCE
  Synthetic Construct
RSKQAAK

SEQ ID NO: 17156 - protein, 7 aa, ARTIFICIAL SEQUENCE
  Synthetic Construct
RSKQADK

SEQ ID NO: 17157 - protein, 7 aa, ARTIFICIAL SEQUENCE
  Synthetic Construct
RSKQAEK

SEQ ID NO: 17158 - protein, 7 aa, ARTIFICIAL SEQUENCE
  Synthetic Construct
RSKQAFK

SEQ ID NO: 17159 - protein, 7 aa, ARTIFICIAL SEQUENCE
  Synthetic Construct
RSKQAGK

SEQ ID NO: 17160 - protein, 7 aa, ARTIFICIAL SEQUENCE
  Synthetic Construct
RSKQAHK

SEQ ID NO: 17161 - protein, 7 aa, ARTIFICIAL SEQUENCE
  Synthetic Construct
RSKQAIK

SEQ ID NO: 17162 - protein, 7 aa, ARTIFICIAL SEQUENCE
  Synthetic Construct
RSKQALK

SEQ ID NO: 17163 - protein, 7 aa, ARTIFICIAL SEQUENCE
  Synthetic Construct
RSKQANK

SEQ ID NO: 17164 - protein, 7 aa, ARTIFICIAL SEQUENCE
  Synthetic Construct
RSKQAQK

SEQ ID NO: 17165 - protein, 7 aa, ARTIFICIAL SEQUENCE
  Synthetic Construct
RSKQARK

SEQ ID NO: 17166 - protein, 7 aa, ARTIFICIAL SEQUENCE
  Synthetic Construct
RSKQASK

SEQ ID NO: 17167 - protein, 7 aa, ARTIFICIAL SEQUENCE
  Synthetic Construct
RSKQATK

SEQ ID NO: 17168 - protein, 7 aa, ARTIFICIAL SEQUENCE
  Synthetic Construct
RSKQAYK

SEQ ID NO: 17169 - protein, 7 aa, ARTIFICIAL SEQUENCE
  Synthetic Construct
RSKQDAK

SEQ ID NO: 17170 - protein, 7 aa, ARTIFICIAL SEQUENCE
  Synthetic Construct
RSKQDDK

SEQ ID NO: 17171 - protein, 7 aa, ARTIFICIAL SEQUENCE
  Synthetic Construct
RSKQDEK

SEQ ID NO: 17172 - protein, 7 aa, ARTIFICIAL SEQUENCE
  Synthetic Construct
RSKQDFK

SEQ ID NO: 17173 - protein, 7 aa, ARTIFICIAL SEQUENCE
  Synthetic Construct
RSKQDGK

SEQ ID NO: 17174 - protein, 7 aa, ARTIFICIAL SEQUENCE
  Synthetic Construct
RSKQDHK

SEQ ID NO: 17175 - protein, 7 aa, ARTIFICIAL SEQUENCE
  Synthetic Construct
RSKQDIK

SEQ ID NO: 17176 - protein, 7 aa, ARTIFICIAL SEQUENCE
  Synthetic Construct
RSKQDLK

SEQ ID NO: 17177 - protein, 7 aa, ARTIFICIAL SEQUENCE
  Synthetic Construct
RSKQDNK

SEQ ID NO: 17178 - protein, 7 aa, ARTIFICIAL SEQUENCE
  Synthetic Construct
RSKQDQK

SEQ ID NO: 17179 - protein, 7 aa, ARTIFICIAL SEQUENCE
  Synthetic Construct
RSKQDRK

SEQ ID NO: 17180 - protein, 7 aa, ARTIFICIAL SEQUENCE
  Synthetic Construct
RSKQDSK

SEQ ID NO: 17181 - protein, 7 aa, ARTIFICIAL SEQUENCE
  Synthetic Construct
RSKQDTK

SEQ ID NO: 17182 - protein, 7 aa, ARTIFICIAL SEQUENCE
  Synthetic Construct
RSKQDYK

SEQ ID NO: 17183 - protein, 7 aa, ARTIFICIAL SEQUENCE
  Synthetic Construct
RSKQEAK

SEQ ID NO: 17184 - protein, 7 aa, ARTIFICIAL SEQUENCE
  Synthetic Construct
RSKQEDK

SEQ ID NO: 17185 - protein, 7 aa, ARTIFICIAL SEQUENCE
  Synthetic Construct
RSKQEEK

SEQ ID NO: 17186 - protein, 7 aa, ARTIFICIAL SEQUENCE
  Synthetic Construct
RSKQEFK

SEQ ID NO: 17187 - protein, 7 aa, ARTIFICIAL SEQUENCE
  Synthetic Construct
RSKQEGK

SEQ ID NO: 17188 - protein, 7 aa, ARTIFICIAL SEQUENCE
  Synthetic Construct
RSKQEHK

SEQ ID NO: 17189 - protein, 7 aa, ARTIFICIAL SEQUENCE
  Synthetic Construct
RSKQEIK

SEQ ID NO: 17190 - protein, 7 aa, ARTIFICIAL SEQUENCE
  Synthetic Construct
RSKQELK

SEQ ID NO: 17191 - protein, 7 aa, ARTIFICIAL SEQUENCE
  Synthetic Construct
RSKQENK

SEQ ID NO: 17192 - protein, 7 aa, ARTIFICIAL SEQUENCE
  Synthetic Construct
RSKQEQK

SEQ ID NO: 17193 - protein, 7 aa, ARTIFICIAL SEQUENCE
  Synthetic Construct
RSKQERK

SEQ ID NO: 17194 - protein, 7 aa, ARTIFICIAL SEQUENCE
  Synthetic Construct
RSKQESK

SEQ ID NO: 17195 - protein, 7 aa, ARTIFICIAL SEQUENCE
  Synthetic Construct
RSKQETK

SEQ ID NO: 17196 - protein, 7 aa, ARTIFICIAL SEQUENCE
  Synthetic Construct
RSKQEYK

SEQ ID NO: 17197 - protein, 7 aa, ARTIFICIAL SEQUENCE
  Synthetic Construct
RSKQFAK

SEQ ID NO: 17198 - protein, 7 aa, ARTIFICIAL SEQUENCE
  Synthetic Construct
RSKQFDK

SEQ ID NO: 17199 - protein, 7 aa, ARTIFICIAL SEQUENCE
  Synthetic Construct
RSKQFEK

SEQ ID NO: 17200 - protein, 7 aa, ARTIFICIAL SEQUENCE
  Synthetic Construct
RSKQFFK

SEQ ID NO: 17201 - protein, 7 aa, ARTIFICIAL SEQUENCE
  Synthetic Construct
RSKQFGK

SEQ ID NO: 17202 - protein, 7 aa, ARTIFICIAL SEQUENCE
  Synthetic Construct
RSKQFHK

SEQ ID NO: 17203 - protein, 7 aa, ARTIFICIAL SEQUENCE
  Synthetic Construct
RSKQFIK

SEQ ID NO: 17204 - protein, 7 aa, ARTIFICIAL SEQUENCE
  Synthetic Construct
RSKQFLK

SEQ ID NO: 17205 - protein, 7 aa, ARTIFICIAL SEQUENCE
  Synthetic Construct
RSKQFNK

SEQ ID NO: 17206 - protein, 7 aa, ARTIFICIAL SEQUENCE
  Synthetic Construct
RSKQFQK

SEQ ID NO: 17207 - protein, 7 aa, ARTIFICIAL SEQUENCE
  Synthetic Construct
RSKQFRK

SEQ ID NO: 17208 - protein, 7 aa, ARTIFICIAL SEQUENCE
  Synthetic Construct
RSKQFSK

SEQ ID NO: 17209 - protein, 7 aa, ARTIFICIAL SEQUENCE
  Synthetic Construct
RSKQFTK

SEQ ID NO: 17210 - protein, 7 aa, ARTIFICIAL SEQUENCE
  Synthetic Construct
RSKQFYK

SEQ ID NO: 17211 - protein, 7 aa, ARTIFICIAL SEQUENCE
  Synthetic Construct
RSKQGAK

SEQ ID NO: 17212 - protein, 7 aa, ARTIFICIAL SEQUENCE
  Synthetic Construct
RSKQGDK

SEQ ID NO: 17213 - protein, 7 aa, ARTIFICIAL SEQUENCE
  Synthetic Construct
RSKQGEK

SEQ ID NO: 17214 - protein, 7 aa, ARTIFICIAL SEQUENCE
  Synthetic Construct
RSKQGFK

SEQ ID NO: 17215 - protein, 7 aa, ARTIFICIAL SEQUENCE
  Synthetic Construct
RSKQGGK

SEQ ID NO: 17216 - protein, 7 aa, ARTIFICIAL SEQUENCE
  Synthetic Construct
RSKQGHK

SEQ ID NO: 17217 - protein, 7 aa, ARTIFICIAL SEQUENCE
  Synthetic Construct
RSKQGIK

SEQ ID NO: 17218 - protein, 7 aa, ARTIFICIAL SEQUENCE
  Synthetic Construct
RSKQGLK

SEQ ID NO: 17219 - protein, 7 aa, ARTIFICIAL SEQUENCE
  Synthetic Construct
RSKQGNK

SEQ ID NO: 17220 - protein, 7 aa, ARTIFICIAL SEQUENCE
  Synthetic Construct
RSKQGQK

SEQ ID NO: 17221 - protein, 7 aa, ARTIFICIAL SEQUENCE
  Synthetic Construct
RSKQGRK

SEQ ID NO: 17222 - protein, 7 aa, ARTIFICIAL SEQUENCE
  Synthetic Construct
RSKQGSK

SEQ ID NO: 17223 - protein, 7 aa, ARTIFICIAL SEQUENCE
  Synthetic Construct
RSKQGTK

SEQ ID NO: 17224 - protein, 7 aa, ARTIFICIAL SEQUENCE
  Synthetic Construct
RSKQGYK

SEQ ID NO: 17225 - protein, 7 aa, ARTIFICIAL SEQUENCE
  Synthetic Construct
RSKQHAK

SEQ ID NO: 17226 - protein, 7 aa, ARTIFICIAL SEQUENCE
  Synthetic Construct
RSKQHDK

SEQ ID NO: 17227 - protein, 7 aa, ARTIFICIAL SEQUENCE
  Synthetic Construct
RSKQHEK

SEQ ID NO: 17228 - protein, 7 aa, ARTIFICIAL SEQUENCE
  Synthetic Construct
RSKQHFK

SEQ ID NO: 17229 - protein, 7 aa, ARTIFICIAL SEQUENCE
  Synthetic Construct
RSKQHGK

SEQ ID NO: 17230 - protein, 7 aa, ARTIFICIAL SEQUENCE
  Synthetic Construct
RSKQHHK

SEQ ID NO: 17231 - protein, 7 aa, ARTIFICIAL SEQUENCE
  Synthetic Construct
RSKQHIK

SEQ ID NO: 17232 - protein, 7 aa, ARTIFICIAL SEQUENCE
  Synthetic Construct
RSKQHLK

SEQ ID NO: 17233 - protein, 7 aa, ARTIFICIAL SEQUENCE
  Synthetic Construct
RSKQHNK

SEQ ID NO: 17234 - protein, 7 aa, ARTIFICIAL SEQUENCE
  Synthetic Construct
RSKQHQK

SEQ ID NO: 17235 - protein, 7 aa, ARTIFICIAL SEQUENCE
  Synthetic Construct
RSKQHRK

SEQ ID NO: 17236 - protein, 7 aa, ARTIFICIAL SEQUENCE
  Synthetic Construct
RSKQHSK

SEQ ID NO: 17237 - protein, 7 aa, ARTIFICIAL SEQUENCE
  Synthetic Construct
RSKQHTK

SEQ ID NO: 17238 - protein, 7 aa, ARTIFICIAL SEQUENCE
  Synthetic Construct
RSKQHYK

SEQ ID NO: 17239 - protein, 7 aa, ARTIFICIAL SEQUENCE
  Synthetic Construct
RSKQIAK

SEQ ID NO: 17240 - protein, 7 aa, ARTIFICIAL SEQUENCE
  Synthetic Construct
RSKQIDK

SEQ ID NO: 17241 - protein, 7 aa, ARTIFICIAL SEQUENCE
  Synthetic Construct
RSKQIEK

SEQ ID NO: 17242 - protein, 7 aa, ARTIFICIAL SEQUENCE
  Synthetic Construct
RSKQIFK

SEQ ID NO: 17243 - protein, 7 aa, ARTIFICIAL SEQUENCE
  Synthetic Construct
RSKQIGK

SEQ ID NO: 17244 - protein, 7 aa, ARTIFICIAL SEQUENCE
  Synthetic Construct
RSKQIHK

SEQ ID NO: 17245 - protein, 7 aa, ARTIFICIAL SEQUENCE
  Synthetic Construct
RSKQIIK

SEQ ID NO: 17246 - protein, 7 aa, ARTIFICIAL SEQUENCE
  Synthetic Construct
RSKQILK

SEQ ID NO: 17247 - protein, 7 aa, ARTIFICIAL SEQUENCE
  Synthetic Construct
RSKQINK

SEQ ID NO: 17248 - protein, 7 aa, ARTIFICIAL SEQUENCE
  Synthetic Construct
RSKQIQK

SEQ ID NO: 17249 - protein, 7 aa, ARTIFICIAL SEQUENCE
  Synthetic Construct
RSKQIRK

SEQ ID NO: 17250 - protein, 7 aa, ARTIFICIAL SEQUENCE
  Synthetic Construct
RSKQISK

SEQ ID NO: 17251 - protein, 7 aa, ARTIFICIAL SEQUENCE
  Synthetic Construct
RSKQITK

SEQ ID NO: 17252 - protein, 7 aa, ARTIFICIAL SEQUENCE
  Synthetic Construct
RSKQIYK

SEQ ID NO: 17253 - protein, 7 aa, ARTIFICIAL SEQUENCE
  Synthetic Construct
RSKQLAK

SEQ ID NO: 17254 - protein, 7 aa, ARTIFICIAL SEQUENCE
  Synthetic Construct
RSKQLDK

SEQ ID NO: 17255 - protein, 7 aa, ARTIFICIAL SEQUENCE
  Synthetic Construct
RSKQLEK

SEQ ID NO: 17256 - protein, 7 aa, ARTIFICIAL SEQUENCE
  Synthetic Construct
RSKQLFK

SEQ ID NO: 17257 - protein, 7 aa, ARTIFICIAL SEQUENCE
  Synthetic Construct
RSKQLGK

SEQ ID NO: 17258 - protein, 7 aa, ARTIFICIAL SEQUENCE
  Synthetic Construct
RSKQLHK

SEQ ID NO: 17259 - protein, 7 aa, ARTIFICIAL SEQUENCE
  Synthetic Construct
RSKQLIK

SEQ ID NO: 17260 - protein, 7 aa, ARTIFICIAL SEQUENCE
  Synthetic Construct
RSKQLLK

SEQ ID NO: 17261 - protein, 7 aa, ARTIFICIAL SEQUENCE
  Synthetic Construct
RSKQLNK

SEQ ID NO: 17262 - protein, 7 aa, ARTIFICIAL SEQUENCE
  Synthetic Construct
RSKQLQK

SEQ ID NO: 17263 - protein, 7 aa, ARTIFICIAL SEQUENCE
  Synthetic Construct
RSKQLRK

SEQ ID NO: 17264 - protein, 7 aa, ARTIFICIAL SEQUENCE
  Synthetic Construct
RSKQLSK

SEQ ID NO: 17265 - protein, 7 aa, ARTIFICIAL SEQUENCE
  Synthetic Construct
RSKQLTK

SEQ ID NO: 17266 - protein, 7 aa, ARTIFICIAL SEQUENCE
  Synthetic Construct
RSKQLYK

SEQ ID NO: 17267 - protein, 7 aa, ARTIFICIAL SEQUENCE
  Synthetic Construct
RSKQNAK

SEQ ID NO: 17268 - protein, 7 aa, ARTIFICIAL SEQUENCE
  Synthetic Construct
RSKQNDK

SEQ ID NO: 17269 - protein, 7 aa, ARTIFICIAL SEQUENCE
  Synthetic Construct
RSKQNEK

SEQ ID NO: 17270 - protein, 7 aa, ARTIFICIAL SEQUENCE
  Synthetic Construct
RSKQNFK

SEQ ID NO: 17271 - protein, 7 aa, ARTIFICIAL SEQUENCE
  Synthetic Construct
RSKQNGK

SEQ ID NO: 17272 - protein, 7 aa, ARTIFICIAL SEQUENCE
  Synthetic Construct
RSKQNHK

SEQ ID NO: 17273 - protein, 7 aa, ARTIFICIAL SEQUENCE
  Synthetic Construct
RSKQNIK

SEQ ID NO: 17274 - protein, 7 aa, ARTIFICIAL SEQUENCE
  Synthetic Construct
RSKQNLK

SEQ ID NO: 17275 - protein, 7 aa, ARTIFICIAL SEQUENCE
  Synthetic Construct
RSKQNNK

SEQ ID NO: 17276 - protein, 7 aa, ARTIFICIAL SEQUENCE
  Synthetic Construct
RSKQNQK

SEQ ID NO: 17277 - protein, 7 aa, ARTIFICIAL SEQUENCE
  Synthetic Construct
RSKQNRK

SEQ ID NO: 17278 - protein, 7 aa, ARTIFICIAL SEQUENCE
  Synthetic Construct
RSKQNSK

SEQ ID NO: 17279 - protein, 7 aa, ARTIFICIAL SEQUENCE
  Synthetic Construct
RSKQNTK

SEQ ID NO: 17280 - protein, 7 aa, ARTIFICIAL SEQUENCE
  Synthetic Construct
RSKQNYK

SEQ ID NO: 17281 - protein, 7 aa, ARTIFICIAL SEQUENCE
  Synthetic Construct
RSKQQAK

SEQ ID NO: 17282 - protein, 7 aa, ARTIFICIAL SEQUENCE
  Synthetic Construct
RSKQQDK

SEQ ID NO: 17283 - protein, 7 aa, ARTIFICIAL SEQUENCE
  Synthetic Construct
RSKQQEK

SEQ ID NO: 17284 - protein, 7 aa, ARTIFICIAL SEQUENCE
  Synthetic Construct
RSKQQFK

SEQ ID NO: 17285 - protein, 7 aa, ARTIFICIAL SEQUENCE
  Synthetic Construct
RSKQQGK

SEQ ID NO: 17286 - protein, 7 aa, ARTIFICIAL SEQUENCE
  Synthetic Construct
RSKQQHK

SEQ ID NO: 17287 - protein, 7 aa, ARTIFICIAL SEQUENCE
  Synthetic Construct
RSKQQIK

SEQ ID NO: 17288 - protein, 7 aa, ARTIFICIAL SEQUENCE
  Synthetic Construct
RSKQQLK

SEQ ID NO: 17289 - protein, 7 aa, ARTIFICIAL SEQUENCE
  Synthetic Construct
RSKQQNK

SEQ ID NO: 17290 - protein, 7 aa, ARTIFICIAL SEQUENCE
  Synthetic Construct
RSKQQQK

SEQ ID NO: 17291 - protein, 7 aa, ARTIFICIAL SEQUENCE
  Synthetic Construct
RSKQQRK

SEQ ID NO: 17292 - protein, 7 aa, ARTIFICIAL SEQUENCE
  Synthetic Construct
RSKQQSK

SEQ ID NO: 17293 - protein, 7 aa, ARTIFICIAL SEQUENCE
  Synthetic Construct
RSKQQTK

SEQ ID NO: 17294 - protein, 7 aa, ARTIFICIAL SEQUENCE
  Synthetic Construct
RSKQQYK

SEQ ID NO: 17295 - protein, 7 aa, ARTIFICIAL SEQUENCE
  Synthetic Construct
RSKQRAK

SEQ ID NO: 17296 - protein, 7 aa, ARTIFICIAL SEQUENCE
  Synthetic Construct
RSKQRDK

SEQ ID NO: 17297 - protein, 7 aa, ARTIFICIAL SEQUENCE
  Synthetic Construct
RSKQREK

SEQ ID NO: 17298 - protein, 7 aa, ARTIFICIAL SEQUENCE
  Synthetic Construct
RSKQRFK

SEQ ID NO: 17299 - protein, 7 aa, ARTIFICIAL SEQUENCE
  Synthetic Construct
RSKQRGK

SEQ ID NO: 17300 - protein, 7 aa, ARTIFICIAL SEQUENCE
  Synthetic Construct
RSKQRHK

SEQ ID NO: 17301 - protein, 7 aa, ARTIFICIAL SEQUENCE
  Synthetic Construct
RSKQRIK

SEQ ID NO: 17302 - protein, 7 aa, ARTIFICIAL SEQUENCE
  Synthetic Construct
RSKQRLK

SEQ ID NO: 17303 - protein, 7 aa, ARTIFICIAL SEQUENCE
  Synthetic Construct
RSKQRNK

SEQ ID NO: 17304 - protein, 7 aa, ARTIFICIAL SEQUENCE
  Synthetic Construct
RSKQRQK

SEQ ID NO: 17305 - protein, 7 aa, ARTIFICIAL SEQUENCE
  Synthetic Construct
RSKQRRK

SEQ ID NO: 17306 - protein, 7 aa, ARTIFICIAL SEQUENCE
  Synthetic Construct
RSKQRSK

SEQ ID NO: 17307 - protein, 7 aa, ARTIFICIAL SEQUENCE
  Synthetic Construct
RSKQRTK

SEQ ID NO: 17308 - protein, 7 aa, ARTIFICIAL SEQUENCE
  Synthetic Construct
RSKQRYK

SEQ ID NO: 17309 - protein, 7 aa, ARTIFICIAL SEQUENCE
  Synthetic Construct
RSKQSAK

SEQ ID NO: 17310 - protein, 7 aa, ARTIFICIAL SEQUENCE
  Synthetic Construct
RSKQSDK

SEQ ID NO: 17311 - protein, 7 aa, ARTIFICIAL SEQUENCE
  Synthetic Construct
RSKQSEK

SEQ ID NO: 17312 - protein, 7 aa, ARTIFICIAL SEQUENCE
  Synthetic Construct
RSKQSFK

SEQ ID NO: 17313 - protein, 7 aa, ARTIFICIAL SEQUENCE
  Synthetic Construct
RSKQSGK

SEQ ID NO: 17314 - protein, 7 aa, ARTIFICIAL SEQUENCE
  Synthetic Construct
RSKQSHK

SEQ ID NO: 17315 - protein, 7 aa, ARTIFICIAL SEQUENCE
  Synthetic Construct
RSKQSIK

SEQ ID NO: 17316 - protein, 7 aa, ARTIFICIAL SEQUENCE
  Synthetic Construct
RSKQSLK

SEQ ID NO: 17317 - protein, 7 aa, ARTIFICIAL SEQUENCE
  Synthetic Construct
RSKQSNK

SEQ ID NO: 17318 - protein, 7 aa, ARTIFICIAL SEQUENCE
  Synthetic Construct
RSKQSQK

SEQ ID NO: 17319 - protein, 7 aa, ARTIFICIAL SEQUENCE
  Synthetic Construct
RSKQSRK

SEQ ID NO: 17320 - protein, 7 aa, ARTIFICIAL SEQUENCE
  Synthetic Construct
RSKQSSK

SEQ ID NO: 17321 - protein, 7 aa, ARTIFICIAL SEQUENCE
  Synthetic Construct
RSKQSTK

SEQ ID NO: 17322 - protein, 7 aa, ARTIFICIAL SEQUENCE
  Synthetic Construct
RSKQSYK

SEQ ID NO: 17323 - protein, 7 aa, ARTIFICIAL SEQUENCE
  Synthetic Construct
RSKQTAK

SEQ ID NO: 17324 - protein, 7 aa, ARTIFICIAL SEQUENCE
  Synthetic Construct
RSKQTDK

SEQ ID NO: 17325 - protein, 7 aa, ARTIFICIAL SEQUENCE
  Synthetic Construct
RSKQTEK

SEQ ID NO: 17326 - protein, 7 aa, ARTIFICIAL SEQUENCE
  Synthetic Construct
RSKQTFK

SEQ ID NO: 17327 - protein, 7 aa, ARTIFICIAL SEQUENCE
  Synthetic Construct
RSKQTGK

SEQ ID NO: 17328 - protein, 7 aa, ARTIFICIAL SEQUENCE
  Synthetic Construct
RSKQTHK

SEQ ID NO: 17329 - protein, 7 aa, ARTIFICIAL SEQUENCE
  Synthetic Construct
RSKQTIK

SEQ ID NO: 17330 - protein, 7 aa, ARTIFICIAL SEQUENCE
  Synthetic Construct
RSKQTLK

SEQ ID NO: 17331 - protein, 7 aa, ARTIFICIAL SEQUENCE
  Synthetic Construct
RSKQTNK

SEQ ID NO: 17332 - protein, 7 aa, ARTIFICIAL SEQUENCE
  Synthetic Construct
RSKQTQK

SEQ ID NO: 17333 - protein, 7 aa, ARTIFICIAL SEQUENCE
  Synthetic Construct
RSKQTRK

SEQ ID NO: 17334 - protein, 7 aa, ARTIFICIAL SEQUENCE
  Synthetic Construct
RSKQTSK

SEQ ID NO: 17335 - protein, 7 aa, ARTIFICIAL SEQUENCE
  Synthetic Construct
RSKQTTK

SEQ ID NO: 17336 - protein, 7 aa, ARTIFICIAL SEQUENCE
  Synthetic Construct
RSKQTYK

SEQ ID NO: 17337 - protein, 7 aa, ARTIFICIAL SEQUENCE
  Synthetic Construct
RSKQYAK

SEQ ID NO: 17338 - protein, 7 aa, ARTIFICIAL SEQUENCE
  Synthetic Construct
RSKQYDK

SEQ ID NO: 17339 - protein, 7 aa, ARTIFICIAL SEQUENCE
  Synthetic Construct
RSKQYEK

SEQ ID NO: 17340 - protein, 7 aa, ARTIFICIAL SEQUENCE
  Synthetic Construct
RSKQYFK

SEQ ID NO: 17341 - protein, 7 aa, ARTIFICIAL SEQUENCE
  Synthetic Construct
RSKQYGK

SEQ ID NO: 17342 - protein, 7 aa, ARTIFICIAL SEQUENCE
  Synthetic Construct
RSKQYHK

SEQ ID NO: 17343 - protein, 7 aa, ARTIFICIAL SEQUENCE
  Synthetic Construct
RSKQYIK

SEQ ID NO: 17344 - protein, 7 aa, ARTIFICIAL SEQUENCE
  Synthetic Construct
RSKQYLK

SEQ ID NO: 17345 - protein, 7 aa, ARTIFICIAL SEQUENCE
  Synthetic Construct
RSKQYNK

SEQ ID NO: 17346 - protein, 7 aa, ARTIFICIAL SEQUENCE
  Synthetic Construct
RSKQYQK

SEQ ID NO: 17347 - protein, 7 aa, ARTIFICIAL SEQUENCE
  Synthetic Construct
RSKQYRK

SEQ ID NO: 17348 - protein, 7 aa, ARTIFICIAL SEQUENCE
  Synthetic Construct
RSKQYSK

SEQ ID NO: 17349 - protein, 7 aa, ARTIFICIAL SEQUENCE
  Synthetic Construct
RSKQYTK

SEQ ID NO: 17350 - protein, 7 aa, ARTIFICIAL SEQUENCE
  Synthetic Construct
RSKQYYK

SEQ ID NO: 17351 - protein, 7 aa, ARTIFICIAL SEQUENCE
  Synthetic Construct
RSKRAAK

SEQ ID NO: 17352 - protein, 7 aa, ARTIFICIAL SEQUENCE
  Synthetic Construct
RSKRADK

SEQ ID NO: 17353 - protein, 7 aa, ARTIFICIAL SEQUENCE
  Synthetic Construct
RSKRAEK

SEQ ID NO: 17354 - protein, 7 aa, ARTIFICIAL SEQUENCE
  Synthetic Construct
RSKRAFK

SEQ ID NO: 17355 - protein, 7 aa, ARTIFICIAL SEQUENCE
  Synthetic Construct
RSKRAGK

SEQ ID NO: 17356 - protein, 7 aa, ARTIFICIAL SEQUENCE
  Synthetic Construct
RSKRAHK

SEQ ID NO: 17357 - protein, 7 aa, ARTIFICIAL SEQUENCE
  Synthetic Construct
RSKRAIK

SEQ ID NO: 17358 - protein, 7 aa, ARTIFICIAL SEQUENCE
  Synthetic Construct
RSKRALK

SEQ ID NO: 17359 - protein, 7 aa, ARTIFICIAL SEQUENCE
  Synthetic Construct
RSKRANK

SEQ ID NO: 17360 - protein, 7 aa, ARTIFICIAL SEQUENCE
  Synthetic Construct
RSKRAQK

SEQ ID NO: 17361 - protein, 7 aa, ARTIFICIAL SEQUENCE
  Synthetic Construct
RSKRARK

SEQ ID NO: 17362 - protein, 7 aa, ARTIFICIAL SEQUENCE
  Synthetic Construct
RSKRASK

SEQ ID NO: 17363 - protein, 7 aa, ARTIFICIAL SEQUENCE
  Synthetic Construct
RSKRATK

SEQ ID NO: 17364 - protein, 7 aa, ARTIFICIAL SEQUENCE
  Synthetic Construct
RSKRAYK

SEQ ID NO: 17365 - protein, 7 aa, ARTIFICIAL SEQUENCE
  Synthetic Construct
RSKRDAK

SEQ ID NO: 17366 - protein, 7 aa, ARTIFICIAL SEQUENCE
  Synthetic Construct
RSKRDDK

SEQ ID NO: 17367 - protein, 7 aa, ARTIFICIAL SEQUENCE
  Synthetic Construct
RSKRDEK

SEQ ID NO: 17368 - protein, 7 aa, ARTIFICIAL SEQUENCE
  Synthetic Construct
RSKRDFK

SEQ ID NO: 17369 - protein, 7 aa, ARTIFICIAL SEQUENCE
  Synthetic Construct
RSKRDGK

SEQ ID NO: 17370 - protein, 7 aa, ARTIFICIAL SEQUENCE
  Synthetic Construct
RSKRDHK

SEQ ID NO: 17371 - protein, 7 aa, ARTIFICIAL SEQUENCE
  Synthetic Construct
RSKRDIK

SEQ ID NO: 17372 - protein, 7 aa, ARTIFICIAL SEQUENCE
  Synthetic Construct
RSKRDLK

SEQ ID NO: 17373 - protein, 7 aa, ARTIFICIAL SEQUENCE
  Synthetic Construct
RSKRDNK

SEQ ID NO: 17374 - protein, 7 aa, ARTIFICIAL SEQUENCE
  Synthetic Construct
RSKRDQK

SEQ ID NO: 17375 - protein, 7 aa, ARTIFICIAL SEQUENCE
  Synthetic Construct
RSKRDRK

SEQ ID NO: 17376 - protein, 7 aa, ARTIFICIAL SEQUENCE
  Synthetic Construct
RSKRDSK

SEQ ID NO: 17377 - protein, 7 aa, ARTIFICIAL SEQUENCE
  Synthetic Construct
RSKRDTK

SEQ ID NO: 17378 - protein, 7 aa, ARTIFICIAL SEQUENCE
  Synthetic Construct
RSKRDYK

SEQ ID NO: 17379 - protein, 7 aa, ARTIFICIAL SEQUENCE
  Synthetic Construct
RSKREAK

SEQ ID NO: 17380 - protein, 7 aa, ARTIFICIAL SEQUENCE
  Synthetic Construct
RSKREDK

SEQ ID NO: 17381 - protein, 7 aa, ARTIFICIAL SEQUENCE
  Synthetic Construct
RSKREEK

SEQ ID NO: 17382 - protein, 7 aa, ARTIFICIAL SEQUENCE
  Synthetic Construct
RSKREFK

SEQ ID NO: 17383 - protein, 7 aa, ARTIFICIAL SEQUENCE
  Synthetic Construct
RSKREGK

SEQ ID NO: 17384 - protein, 7 aa, ARTIFICIAL SEQUENCE
  Synthetic Construct
RSKREHK

SEQ ID NO: 17385 - protein, 7 aa, ARTIFICIAL SEQUENCE
  Synthetic Construct
RSKREIK

SEQ ID NO: 17386 - protein, 7 aa, ARTIFICIAL SEQUENCE
  Synthetic Construct
RSKRELK

SEQ ID NO: 17387 - protein, 7 aa, ARTIFICIAL SEQUENCE
  Synthetic Construct
RSKRENK

SEQ ID NO: 17388 - protein, 7 aa, ARTIFICIAL SEQUENCE
  Synthetic Construct
RSKREQK

SEQ ID NO: 17389 - protein, 7 aa, ARTIFICIAL SEQUENCE
  Synthetic Construct
RSKRERK

SEQ ID NO: 17390 - protein, 7 aa, ARTIFICIAL SEQUENCE
  Synthetic Construct
RSKRESK

SEQ ID NO: 17391 - protein, 7 aa, ARTIFICIAL SEQUENCE
  Synthetic Construct
RSKRETK

SEQ ID NO: 17392 - protein, 7 aa, ARTIFICIAL SEQUENCE
  Synthetic Construct
RSKREYK

SEQ ID NO: 17393 - protein, 7 aa, ARTIFICIAL SEQUENCE
  Synthetic Construct
RSKRFAK

SEQ ID NO: 17394 - protein, 7 aa, ARTIFICIAL SEQUENCE
  Synthetic Construct
RSKRFDK

SEQ ID NO: 17395 - protein, 7 aa, ARTIFICIAL SEQUENCE
  Synthetic Construct
RSKRFEK

SEQ ID NO: 17396 - protein, 7 aa, ARTIFICIAL SEQUENCE
  Synthetic Construct
RSKRFFK

SEQ ID NO: 17397 - protein, 7 aa, ARTIFICIAL SEQUENCE
  Synthetic Construct
RSKRFGK

SEQ ID NO: 17398 - protein, 7 aa, ARTIFICIAL SEQUENCE
  Synthetic Construct
RSKRFHK

SEQ ID NO: 17399 - protein, 7 aa, ARTIFICIAL SEQUENCE
  Synthetic Construct
RSKRFIK

SEQ ID NO: 17400 - protein, 7 aa, ARTIFICIAL SEQUENCE
  Synthetic Construct
RSKRFLK

SEQ ID NO: 17401 - protein, 7 aa, ARTIFICIAL SEQUENCE
  Synthetic Construct
RSKRFNK

SEQ ID NO: 17402 - protein, 7 aa, ARTIFICIAL SEQUENCE
  Synthetic Construct
RSKRFQK

SEQ ID NO: 17403 - protein, 7 aa, ARTIFICIAL SEQUENCE
  Synthetic Construct
RSKRFRK

SEQ ID NO: 17404 - protein, 7 aa, ARTIFICIAL SEQUENCE
  Synthetic Construct
RSKRFSK

SEQ ID NO: 17405 - protein, 7 aa, ARTIFICIAL SEQUENCE
  Synthetic Construct
RSKRFTK

SEQ ID NO: 17406 - protein, 7 aa, ARTIFICIAL SEQUENCE
  Synthetic Construct
RSKRFYK

SEQ ID NO: 17407 - protein, 7 aa, ARTIFICIAL SEQUENCE
  Synthetic Construct
RSKRGAK

SEQ ID NO: 17408 - protein, 7 aa, ARTIFICIAL SEQUENCE
  Synthetic Construct
RSKRGDK

SEQ ID NO: 17409 - protein, 7 aa, ARTIFICIAL SEQUENCE
  Synthetic Construct
RSKRGEK

SEQ ID NO: 17410 - protein, 7 aa, ARTIFICIAL SEQUENCE
  Synthetic Construct
RSKRGFK

SEQ ID NO: 17411 - protein, 7 aa, ARTIFICIAL SEQUENCE
  Synthetic Construct
RSKRGGK

SEQ ID NO: 17412 - protein, 7 aa, ARTIFICIAL SEQUENCE
  Synthetic Construct
RSKRGHK

SEQ ID NO: 17413 - protein, 7 aa, ARTIFICIAL SEQUENCE
  Synthetic Construct
RSKRGIK

SEQ ID NO: 17414 - protein, 7 aa, ARTIFICIAL SEQUENCE
  Synthetic Construct
RSKRGLK

SEQ ID NO: 17415 - protein, 7 aa, ARTIFICIAL SEQUENCE
  Synthetic Construct
RSKRGNK

SEQ ID NO: 17416 - protein, 7 aa, ARTIFICIAL SEQUENCE
  Synthetic Construct
RSKRGQK

SEQ ID NO: 17417 - protein, 7 aa, ARTIFICIAL SEQUENCE
  Synthetic Construct
RSKRGRK

SEQ ID NO: 17418 - protein, 7 aa, ARTIFICIAL SEQUENCE
  Synthetic Construct
RSKRGSK

SEQ ID NO: 17419 - protein, 7 aa, ARTIFICIAL SEQUENCE
  Synthetic Construct
RSKRGTK

SEQ ID NO: 17420 - protein, 7 aa, ARTIFICIAL SEQUENCE
  Synthetic Construct
RSKRGYK

SEQ ID NO: 17421 - protein, 7 aa, ARTIFICIAL SEQUENCE
  Synthetic Construct
RSKRHAK

SEQ ID NO: 17422 - protein, 7 aa, ARTIFICIAL SEQUENCE
  Synthetic Construct
RSKRHDK

SEQ ID NO: 17423 - protein, 7 aa, ARTIFICIAL SEQUENCE
  Synthetic Construct
RSKRHEK

SEQ ID NO: 17424 - protein, 7 aa, ARTIFICIAL SEQUENCE
  Synthetic Construct
RSKRHFK

SEQ ID NO: 17425 - protein, 7 aa, ARTIFICIAL SEQUENCE
  Synthetic Construct
RSKRHGK

SEQ ID NO: 17426 - protein, 7 aa, ARTIFICIAL SEQUENCE
  Synthetic Construct
RSKRHHK

SEQ ID NO: 17427 - protein, 7 aa, ARTIFICIAL SEQUENCE
  Synthetic Construct
RSKRHIK

SEQ ID NO: 17428 - protein, 7 aa, ARTIFICIAL SEQUENCE
  Synthetic Construct
RSKRHLK

SEQ ID NO: 17429 - protein, 7 aa, ARTIFICIAL SEQUENCE
  Synthetic Construct
RSKRHNK

SEQ ID NO: 17430 - protein, 7 aa, ARTIFICIAL SEQUENCE
  Synthetic Construct
RSKRHQK

SEQ ID NO: 17431 - protein, 7 aa, ARTIFICIAL SEQUENCE
  Synthetic Construct
RSKRHRK

SEQ ID NO: 17432 - protein, 7 aa, ARTIFICIAL SEQUENCE
  Synthetic Construct
RSKRHSK

SEQ ID NO: 17433 - protein, 7 aa, ARTIFICIAL SEQUENCE
  Synthetic Construct
RSKRHTK

SEQ ID NO: 17434 - protein, 7 aa, ARTIFICIAL SEQUENCE
  Synthetic Construct
RSKRHYK

SEQ ID NO: 17435 - protein, 7 aa, ARTIFICIAL SEQUENCE
  Synthetic Construct
RSKRIAK

SEQ ID NO: 17436 - protein, 7 aa, ARTIFICIAL SEQUENCE
  Synthetic Construct
RSKRIDK

SEQ ID NO: 17437 - protein, 7 aa, ARTIFICIAL SEQUENCE
  Synthetic Construct
RSKRIEK

SEQ ID NO: 17438 - protein, 7 aa, ARTIFICIAL SEQUENCE
  Synthetic Construct
RSKRIFK

SEQ ID NO: 17439 - protein, 7 aa, ARTIFICIAL SEQUENCE
  Synthetic Construct
RSKRIGK

SEQ ID NO: 17440 - protein, 7 aa, ARTIFICIAL SEQUENCE
  Synthetic Construct
RSKRIHK

SEQ ID NO: 17441 - protein, 7 aa, ARTIFICIAL SEQUENCE
  Synthetic Construct
RSKRIIK

SEQ ID NO: 17442 - protein, 7 aa, ARTIFICIAL SEQUENCE
  Synthetic Construct
RSKRILK

SEQ ID NO: 17443 - protein, 7 aa, ARTIFICIAL SEQUENCE
  Synthetic Construct
RSKRINK

SEQ ID NO: 17444 - protein, 7 aa, ARTIFICIAL SEQUENCE
  Synthetic Construct
RSKRIQK

SEQ ID NO: 17445 - protein, 7 aa, ARTIFICIAL SEQUENCE
  Synthetic Construct
RSKRIRK

SEQ ID NO: 17446 - protein, 7 aa, ARTIFICIAL SEQUENCE
  Synthetic Construct
RSKRISK

SEQ ID NO: 17447 - protein, 7 aa, ARTIFICIAL SEQUENCE
  Synthetic Construct
RSKRITK

SEQ ID NO: 17448 - protein, 7 aa, ARTIFICIAL SEQUENCE
  Synthetic Construct
RSKRIYK

SEQ ID NO: 17449 - protein, 7 aa, ARTIFICIAL SEQUENCE
  Synthetic Construct
RSKRLAK

SEQ ID NO: 17450 - protein, 7 aa, ARTIFICIAL SEQUENCE
  Synthetic Construct
RSKRLDK

SEQ ID NO: 17451 - protein, 7 aa, ARTIFICIAL SEQUENCE
  Synthetic Construct
RSKRLEK

SEQ ID NO: 17452 - protein, 7 aa, ARTIFICIAL SEQUENCE
  Synthetic Construct
RSKRLFK

SEQ ID NO: 17453 - protein, 7 aa, ARTIFICIAL SEQUENCE
  Synthetic Construct
RSKRLGK

SEQ ID NO: 17454 - protein, 7 aa, ARTIFICIAL SEQUENCE
  Synthetic Construct
RSKRLHK

SEQ ID NO: 17455 - protein, 7 aa, ARTIFICIAL SEQUENCE
  Synthetic Construct
RSKRLIK

SEQ ID NO: 17456 - protein, 7 aa, ARTIFICIAL SEQUENCE
  Synthetic Construct
RSKRLLK

SEQ ID NO: 17457 - protein, 7 aa, ARTIFICIAL SEQUENCE
  Synthetic Construct
RSKRLNK

SEQ ID NO: 17458 - protein, 7 aa, ARTIFICIAL SEQUENCE
  Synthetic Construct
RSKRLQK

SEQ ID NO: 17459 - protein, 7 aa, ARTIFICIAL SEQUENCE
  Synthetic Construct
RSKRLRK

SEQ ID NO: 17460 - protein, 7 aa, ARTIFICIAL SEQUENCE
  Synthetic Construct
RSKRLSK

SEQ ID NO: 17461 - protein, 7 aa, ARTIFICIAL SEQUENCE
  Synthetic Construct
RSKRLTK

SEQ ID NO: 17462 - protein, 7 aa, ARTIFICIAL SEQUENCE
  Synthetic Construct
RSKRLYK

SEQ ID NO: 17463 - protein, 7 aa, ARTIFICIAL SEQUENCE
  Synthetic Construct
RSKRNAK

SEQ ID NO: 17464 - protein, 7 aa, ARTIFICIAL SEQUENCE
  Synthetic Construct
RSKRNDK

SEQ ID NO: 17465 - protein, 7 aa, ARTIFICIAL SEQUENCE
  Synthetic Construct
RSKRNEK

SEQ ID NO: 17466 - protein, 7 aa, ARTIFICIAL SEQUENCE
  Synthetic Construct
RSKRNFK

SEQ ID NO: 17467 - protein, 7 aa, ARTIFICIAL SEQUENCE
  Synthetic Construct
RSKRNGK

SEQ ID NO: 17468 - protein, 7 aa, ARTIFICIAL SEQUENCE
  Synthetic Construct
RSKRNHK

SEQ ID NO: 17469 - protein, 7 aa, ARTIFICIAL SEQUENCE
  Synthetic Construct
RSKRNIK

SEQ ID NO: 17470 - protein, 7 aa, ARTIFICIAL SEQUENCE
  Synthetic Construct
RSKRNLK

SEQ ID NO: 17471 - protein, 7 aa, ARTIFICIAL SEQUENCE
  Synthetic Construct
RSKRNNK

SEQ ID NO: 17472 - protein, 7 aa, ARTIFICIAL SEQUENCE
  Synthetic Construct
RSKRNQK

SEQ ID NO: 17473 - protein, 7 aa, ARTIFICIAL SEQUENCE
  Synthetic Construct
RSKRNRK

SEQ ID NO: 17474 - protein, 7 aa, ARTIFICIAL SEQUENCE
  Synthetic Construct
RSKRNSK

SEQ ID NO: 17475 - protein, 7 aa, ARTIFICIAL SEQUENCE
  Synthetic Construct
RSKRNTK

SEQ ID NO: 17476 - protein, 7 aa, ARTIFICIAL SEQUENCE
  Synthetic Construct
RSKRNYK

SEQ ID NO: 17477 - protein, 7 aa, ARTIFICIAL SEQUENCE
  Synthetic Construct
RSKRQAK

SEQ ID NO: 17478 - protein, 7 aa, ARTIFICIAL SEQUENCE
  Synthetic Construct
RSKRQDK

SEQ ID NO: 17479 - protein, 7 aa, ARTIFICIAL SEQUENCE
  Synthetic Construct
RSKRQEK

SEQ ID NO: 17480 - protein, 7 aa, ARTIFICIAL SEQUENCE
  Synthetic Construct
RSKRQFK

SEQ ID NO: 17481 - protein, 7 aa, ARTIFICIAL SEQUENCE
  Synthetic Construct
RSKRQGK

SEQ ID NO: 17482 - protein, 7 aa, ARTIFICIAL SEQUENCE
  Synthetic Construct
RSKRQHK

SEQ ID NO: 17483 - protein, 7 aa, ARTIFICIAL SEQUENCE
  Synthetic Construct
RSKRQIK

SEQ ID NO: 17484 - protein, 7 aa, ARTIFICIAL SEQUENCE
  Synthetic Construct
RSKRQLK

SEQ ID NO: 17485 - protein, 7 aa, ARTIFICIAL SEQUENCE
  Synthetic Construct
RSKRQNK

SEQ ID NO: 17486 - protein, 7 aa, ARTIFICIAL SEQUENCE
  Synthetic Construct
RSKRQQK

SEQ ID NO: 17487 - protein, 7 aa, ARTIFICIAL SEQUENCE
  Synthetic Construct
RSKRQRK

SEQ ID NO: 17488 - protein, 7 aa, ARTIFICIAL SEQUENCE
  Synthetic Construct
RSKRQSK

SEQ ID NO: 17489 - protein, 7 aa, ARTIFICIAL SEQUENCE
  Synthetic Construct
RSKRQTK

SEQ ID NO: 17490 - protein, 7 aa, ARTIFICIAL SEQUENCE
  Synthetic Construct
RSKRQYK

SEQ ID NO: 17491 - protein, 7 aa, ARTIFICIAL SEQUENCE
  Synthetic Construct
RSKRRAK

SEQ ID NO: 17492 - protein, 7 aa, ARTIFICIAL SEQUENCE
  Synthetic Construct
RSKRRDK

SEQ ID NO: 17493 - protein, 7 aa, ARTIFICIAL SEQUENCE
  Synthetic Construct
RSKRREK

SEQ ID NO: 17494 - protein, 7 aa, ARTIFICIAL SEQUENCE
  Synthetic Construct
RSKRRFK

SEQ ID NO: 17495 - protein, 7 aa, ARTIFICIAL SEQUENCE
  Synthetic Construct
RSKRRGK

SEQ ID NO: 17496 - protein, 7 aa, ARTIFICIAL SEQUENCE
  Synthetic Construct
RSKRRHK

SEQ ID NO: 17497 - protein, 7 aa, ARTIFICIAL SEQUENCE
  Synthetic Construct
RSKRRIK

SEQ ID NO: 17498 - protein, 7 aa, ARTIFICIAL SEQUENCE
  Synthetic Construct
RSKRRLK

SEQ ID NO: 17499 - protein, 7 aa, ARTIFICIAL SEQUENCE
  Synthetic Construct
RSKRRNK

SEQ ID NO: 17500 - protein, 7 aa, ARTIFICIAL SEQUENCE
  Synthetic Construct
RSKRRQK

SEQ ID NO: 17501 - protein, 7 aa, ARTIFICIAL SEQUENCE
  Synthetic Construct
RSKRRRK

SEQ ID NO: 17502 - protein, 7 aa, ARTIFICIAL SEQUENCE
  Synthetic Construct
RSKRRSK

SEQ ID NO: 17503 - protein, 7 aa, ARTIFICIAL SEQUENCE
  Synthetic Construct
RSKRRTK

SEQ ID NO: 17504 - protein, 7 aa, ARTIFICIAL SEQUENCE
  Synthetic Construct
RSKRRYK

SEQ ID NO: 17505 - protein, 7 aa, ARTIFICIAL SEQUENCE
  Synthetic Construct
RSKRSAK

SEQ ID NO: 17506 - protein, 7 aa, ARTIFICIAL SEQUENCE
  Synthetic Construct
RSKRSDK

SEQ ID NO: 17507 - protein, 7 aa, ARTIFICIAL SEQUENCE
  Synthetic Construct
RSKRSEK

SEQ ID NO: 17508 - protein, 7 aa, ARTIFICIAL SEQUENCE
  Synthetic Construct
RSKRSFK

SEQ ID NO: 17509 - protein, 7 aa, ARTIFICIAL SEQUENCE
  Synthetic Construct
RSKRSGK

SEQ ID NO: 17510 - protein, 7 aa, ARTIFICIAL SEQUENCE
  Synthetic Construct
RSKRSHK

SEQ ID NO: 17511 - protein, 7 aa, ARTIFICIAL SEQUENCE
  Synthetic Construct
RSKRSIK

SEQ ID NO: 17512 - protein, 7 aa, ARTIFICIAL SEQUENCE
  Synthetic Construct
RSKRSLK

SEQ ID NO: 17513 - protein, 7 aa, ARTIFICIAL SEQUENCE
  Synthetic Construct
RSKRSNK

SEQ ID NO: 17514 - protein, 7 aa, ARTIFICIAL SEQUENCE
  Synthetic Construct
RSKRSQK

SEQ ID NO: 17515 - protein, 7 aa, ARTIFICIAL SEQUENCE
  Synthetic Construct
RSKRSRK

SEQ ID NO: 17516 - protein, 7 aa, ARTIFICIAL SEQUENCE
  Synthetic Construct
RSKRSSK

SEQ ID NO: 17517 - protein, 7 aa, ARTIFICIAL SEQUENCE
  Synthetic Construct
RSKRSTK

SEQ ID NO: 17518 - protein, 7 aa, ARTIFICIAL SEQUENCE
  Synthetic Construct
RSKRSYK

SEQ ID NO: 17519 - protein, 7 aa, ARTIFICIAL SEQUENCE
  Synthetic Construct
RSKRTAK

SEQ ID NO: 17520 - protein, 7 aa, ARTIFICIAL SEQUENCE
  Synthetic Construct
RSKRTDK

SEQ ID NO: 17521 - protein, 7 aa, ARTIFICIAL SEQUENCE
  Synthetic Construct
RSKRTEK

SEQ ID NO: 17522 - protein, 7 aa, ARTIFICIAL SEQUENCE
  Synthetic Construct
RSKRTFK

SEQ ID NO: 17523 - protein, 7 aa, ARTIFICIAL SEQUENCE
  Synthetic Construct
RSKRTGK

SEQ ID NO: 17524 - protein, 7 aa, ARTIFICIAL SEQUENCE
  Synthetic Construct
RSKRTHK

SEQ ID NO: 17525 - protein, 7 aa, ARTIFICIAL SEQUENCE
  Synthetic Construct
RSKRTIK

SEQ ID NO: 17526 - protein, 7 aa, ARTIFICIAL SEQUENCE
  Synthetic Construct
RSKRTLK

SEQ ID NO: 17527 - protein, 7 aa, ARTIFICIAL SEQUENCE
  Synthetic Construct
RSKRTNK

SEQ ID NO: 17528 - protein, 7 aa, ARTIFICIAL SEQUENCE
  Synthetic Construct
RSKRTQK

SEQ ID NO: 17529 - protein, 7 aa, ARTIFICIAL SEQUENCE
  Synthetic Construct
RSKRTRK

SEQ ID NO: 17530 - protein, 7 aa, ARTIFICIAL SEQUENCE
  Synthetic Construct
RSKRTSK

SEQ ID NO: 17531 - protein, 7 aa, ARTIFICIAL SEQUENCE
  Synthetic Construct
RSKRTTK

SEQ ID NO: 17532 - protein, 7 aa, ARTIFICIAL SEQUENCE
  Synthetic Construct
RSKRTYK

SEQ ID NO: 17533 - protein, 7 aa, ARTIFICIAL SEQUENCE
  Synthetic Construct
RSKRYAK

SEQ ID NO: 17534 - protein, 7 aa, ARTIFICIAL SEQUENCE
  Synthetic Construct
RSKRYDK

SEQ ID NO: 17535 - protein, 7 aa, ARTIFICIAL SEQUENCE
  Synthetic Construct
RSKRYEK

SEQ ID NO: 17536 - protein, 7 aa, ARTIFICIAL SEQUENCE
  Synthetic Construct
RSKRYFK

SEQ ID NO: 17537 - protein, 7 aa, ARTIFICIAL SEQUENCE
  Synthetic Construct
RSKRYGK

SEQ ID NO: 17538 - protein, 7 aa, ARTIFICIAL SEQUENCE
  Synthetic Construct
RSKRYHK

SEQ ID NO: 17539 - protein, 7 aa, ARTIFICIAL SEQUENCE
  Synthetic Construct
RSKRYIK

SEQ ID NO: 17540 - protein, 7 aa, ARTIFICIAL SEQUENCE
  Synthetic Construct
RSKRYLK

SEQ ID NO: 17541 - protein, 7 aa, ARTIFICIAL SEQUENCE
  Synthetic Construct
RSKRYNK

SEQ ID NO: 17542 - protein, 7 aa, ARTIFICIAL SEQUENCE
  Synthetic Construct
RSKRYQK

SEQ ID NO: 17543 - protein, 7 aa, ARTIFICIAL SEQUENCE
  Synthetic Construct
RSKRYRK

SEQ ID NO: 17544 - protein, 7 aa, ARTIFICIAL SEQUENCE
  Synthetic Construct
RSKRYSK

SEQ ID NO: 17545 - protein, 7 aa, ARTIFICIAL SEQUENCE
  Synthetic Construct
RSKRYTK

SEQ ID NO: 17546 - protein, 7 aa, ARTIFICIAL SEQUENCE
  Synthetic Construct
RSKRYYK

SEQ ID NO: 17547 - protein, 7 aa, ARTIFICIAL SEQUENCE
  Synthetic Construct
RSKSAAK

SEQ ID NO: 17548 - protein, 7 aa, ARTIFICIAL SEQUENCE
  Synthetic Construct
RSKSADK

SEQ ID NO: 17549 - protein, 7 aa, ARTIFICIAL SEQUENCE
  Synthetic Construct
RSKSAEK

SEQ ID NO: 17550 - protein, 7 aa, ARTIFICIAL SEQUENCE
  Synthetic Construct
RSKSAFK

SEQ ID NO: 17551 - protein, 7 aa, ARTIFICIAL SEQUENCE
  Synthetic Construct
RSKSAGK

SEQ ID NO: 17552 - protein, 7 aa, ARTIFICIAL SEQUENCE
  Synthetic Construct
RSKSAHK

SEQ ID NO: 17553 - protein, 7 aa, ARTIFICIAL SEQUENCE
  Synthetic Construct
RSKSAIK

SEQ ID NO: 17554 - protein, 7 aa, ARTIFICIAL SEQUENCE
  Synthetic Construct
RSKSALK

SEQ ID NO: 17555 - protein, 7 aa, ARTIFICIAL SEQUENCE
  Synthetic Construct
RSKSANK

SEQ ID NO: 17556 - protein, 7 aa, ARTIFICIAL SEQUENCE
  Synthetic Construct
RSKSAQK

SEQ ID NO: 17557 - protein, 7 aa, ARTIFICIAL SEQUENCE
  Synthetic Construct
RSKSARK

SEQ ID NO: 17558 - protein, 7 aa, ARTIFICIAL SEQUENCE
  Synthetic Construct
RSKSASK

SEQ ID NO: 17559 - protein, 7 aa, ARTIFICIAL SEQUENCE
  Synthetic Construct
RSKSATK

SEQ ID NO: 17560 - protein, 7 aa, ARTIFICIAL SEQUENCE
  Synthetic Construct
RSKSAYK

SEQ ID NO: 17561 - protein, 7 aa, ARTIFICIAL SEQUENCE
  Synthetic Construct
RSKSDAK

SEQ ID NO: 17562 - protein, 7 aa, ARTIFICIAL SEQUENCE
  Synthetic Construct
RSKSDDK

SEQ ID NO: 17563 - protein, 7 aa, ARTIFICIAL SEQUENCE
  Synthetic Construct
RSKSDEK

SEQ ID NO: 17564 - protein, 7 aa, ARTIFICIAL SEQUENCE
  Synthetic Construct
RSKSDFK

SEQ ID NO: 17565 - protein, 7 aa, ARTIFICIAL SEQUENCE
  Synthetic Construct
RSKSDGK

SEQ ID NO: 17566 - protein, 7 aa, ARTIFICIAL SEQUENCE
  Synthetic Construct
RSKSDHK

SEQ ID NO: 17567 - protein, 7 aa, ARTIFICIAL SEQUENCE
  Synthetic Construct
RSKSDIK

SEQ ID NO: 17568 - protein, 7 aa, ARTIFICIAL SEQUENCE
  Synthetic Construct
RSKSDLK

SEQ ID NO: 17569 - protein, 7 aa, ARTIFICIAL SEQUENCE
  Synthetic Construct
RSKSDNK

SEQ ID NO: 17570 - protein, 7 aa, ARTIFICIAL SEQUENCE
  Synthetic Construct
RSKSDQK

SEQ ID NO: 17571 - protein, 7 aa, ARTIFICIAL SEQUENCE
  Synthetic Construct
RSKSDRK

SEQ ID NO: 17572 - protein, 7 aa, ARTIFICIAL SEQUENCE
  Synthetic Construct
RSKSDSK

SEQ ID NO: 17573 - protein, 7 aa, ARTIFICIAL SEQUENCE
  Synthetic Construct
RSKSDTK

SEQ ID NO: 17574 - protein, 7 aa, ARTIFICIAL SEQUENCE
  Synthetic Construct
RSKSDYK

SEQ ID NO: 17575 - protein, 7 aa, ARTIFICIAL SEQUENCE
  Synthetic Construct
RSKSEAK

SEQ ID NO: 17576 - protein, 7 aa, ARTIFICIAL SEQUENCE
  Synthetic Construct
RSKSEDK

SEQ ID NO: 17577 - protein, 7 aa, ARTIFICIAL SEQUENCE
  Synthetic Construct
RSKSEEK

SEQ ID NO: 17578 - protein, 7 aa, ARTIFICIAL SEQUENCE
  Synthetic Construct
RSKSEFK

SEQ ID NO: 17579 - protein, 7 aa, ARTIFICIAL SEQUENCE
  Synthetic Construct
RSKSEGK

SEQ ID NO: 17580 - protein, 7 aa, ARTIFICIAL SEQUENCE
  Synthetic Construct
RSKSEHK

SEQ ID NO: 17581 - protein, 7 aa, ARTIFICIAL SEQUENCE
  Synthetic Construct
RSKSEIK

SEQ ID NO: 17582 - protein, 7 aa, ARTIFICIAL SEQUENCE
  Synthetic Construct
RSKSELK

SEQ ID NO: 17583 - protein, 7 aa, ARTIFICIAL SEQUENCE
  Synthetic Construct
RSKSENK

SEQ ID NO: 17584 - protein, 7 aa, ARTIFICIAL SEQUENCE
  Synthetic Construct
RSKSEQK

SEQ ID NO: 17585 - protein, 7 aa, ARTIFICIAL SEQUENCE
  Synthetic Construct
RSKSERK

SEQ ID NO: 17586 - protein, 7 aa, ARTIFICIAL SEQUENCE
  Synthetic Construct
RSKSESK

SEQ ID NO: 17587 - protein, 7 aa, ARTIFICIAL SEQUENCE
  Synthetic Construct
RSKSETK

SEQ ID NO: 17588 - protein, 7 aa, ARTIFICIAL SEQUENCE
  Synthetic Construct
RSKSEYK

SEQ ID NO: 17589 - protein, 7 aa, ARTIFICIAL SEQUENCE
  Synthetic Construct
RSKSFAK

SEQ ID NO: 17590 - protein, 7 aa, ARTIFICIAL SEQUENCE
  Synthetic Construct
RSKSFDK

SEQ ID NO: 17591 - protein, 7 aa, ARTIFICIAL SEQUENCE
  Synthetic Construct
RSKSFEK

SEQ ID NO: 17592 - protein, 7 aa, ARTIFICIAL SEQUENCE
  Synthetic Construct
RSKSFFK

SEQ ID NO: 17593 - protein, 7 aa, ARTIFICIAL SEQUENCE
  Synthetic Construct
RSKSFGK

SEQ ID NO: 17594 - protein, 7 aa, ARTIFICIAL SEQUENCE
  Synthetic Construct
RSKSFHK

SEQ ID NO: 17595 - protein, 7 aa, ARTIFICIAL SEQUENCE
  Synthetic Construct
RSKSFIK

SEQ ID NO: 17596 - protein, 7 aa, ARTIFICIAL SEQUENCE
  Synthetic Construct
RSKSFLK

SEQ ID NO: 17597 - protein, 7 aa, ARTIFICIAL SEQUENCE
  Synthetic Construct
RSKSFNK

SEQ ID NO: 17598 - protein, 7 aa, ARTIFICIAL SEQUENCE
  Synthetic Construct
RSKSFQK

SEQ ID NO: 17599 - protein, 7 aa, ARTIFICIAL SEQUENCE
  Synthetic Construct
RSKSFRK

SEQ ID NO: 17600 - protein, 7 aa, ARTIFICIAL SEQUENCE
  Synthetic Construct
RSKSFSK

SEQ ID NO: 17601 - protein, 7 aa, ARTIFICIAL SEQUENCE
  Synthetic Construct
RSKSFTK

SEQ ID NO: 17602 - protein, 7 aa, ARTIFICIAL SEQUENCE
  Synthetic Construct
RSKSFYK

SEQ ID NO: 17603 - protein, 7 aa, ARTIFICIAL SEQUENCE
  Synthetic Construct
RSKSGAK

SEQ ID NO: 17604 - protein, 7 aa, ARTIFICIAL SEQUENCE
  Synthetic Construct
RSKSGDK

SEQ ID NO: 17605 - protein, 7 aa, ARTIFICIAL SEQUENCE
  Synthetic Construct
RSKSGEK

SEQ ID NO: 17606 - protein, 7 aa, ARTIFICIAL SEQUENCE
  Synthetic Construct
RSKSGFK

SEQ ID NO: 17607 - protein, 7 aa, ARTIFICIAL SEQUENCE
  Synthetic Construct
RSKSGGK

SEQ ID NO: 17608 - protein, 7 aa, ARTIFICIAL SEQUENCE
  Synthetic Construct
RSKSGHK

SEQ ID NO: 17609 - protein, 7 aa, ARTIFICIAL SEQUENCE
  Synthetic Construct
RSKSGIK

SEQ ID NO: 17610 - protein, 7 aa, ARTIFICIAL SEQUENCE
  Synthetic Construct
RSKSGLK

SEQ ID NO: 17611 - protein, 7 aa, ARTIFICIAL SEQUENCE
  Synthetic Construct
RSKSGNK

SEQ ID NO: 17612 - protein, 7 aa, ARTIFICIAL SEQUENCE
  Synthetic Construct
RSKSGQK

SEQ ID NO: 17613 - protein, 7 aa, ARTIFICIAL SEQUENCE
  Synthetic Construct
RSKSGRK

SEQ ID NO: 17614 - protein, 7 aa, ARTIFICIAL SEQUENCE
  Synthetic Construct
RSKSGSK

SEQ ID NO: 17615 - protein, 7 aa, ARTIFICIAL SEQUENCE
  Synthetic Construct
RSKSGTK

SEQ ID NO: 17616 - protein, 7 aa, ARTIFICIAL SEQUENCE
  Synthetic Construct
RSKSGYK

SEQ ID NO: 17617 - protein, 7 aa, ARTIFICIAL SEQUENCE
  Synthetic Construct
RSKSHAK

SEQ ID NO: 17618 - protein, 7 aa, ARTIFICIAL SEQUENCE
  Synthetic Construct
RSKSHDK

SEQ ID NO: 17619 - protein, 7 aa, ARTIFICIAL SEQUENCE
  Synthetic Construct
RSKSHEK

SEQ ID NO: 17620 - protein, 7 aa, ARTIFICIAL SEQUENCE
  Synthetic Construct
RSKSHFK

SEQ ID NO: 17621 - protein, 7 aa, ARTIFICIAL SEQUENCE
  Synthetic Construct
RSKSHGK

SEQ ID NO: 17622 - protein, 7 aa, ARTIFICIAL SEQUENCE
  Synthetic Construct
RSKSHHK

SEQ ID NO: 17623 - protein, 7 aa, ARTIFICIAL SEQUENCE
  Synthetic Construct
RSKSHIK

SEQ ID NO: 17624 - protein, 7 aa, ARTIFICIAL SEQUENCE
  Synthetic Construct
RSKSHLK

SEQ ID NO: 17625 - protein, 7 aa, ARTIFICIAL SEQUENCE
  Synthetic Construct
RSKSHNK

SEQ ID NO: 17626 - protein, 7 aa, ARTIFICIAL SEQUENCE
  Synthetic Construct
RSKSHQK

SEQ ID NO: 17627 - protein, 7 aa, ARTIFICIAL SEQUENCE
  Synthetic Construct
RSKSHRK

SEQ ID NO: 17628 - protein, 7 aa, ARTIFICIAL SEQUENCE
  Synthetic Construct
RSKSHSK

SEQ ID NO: 17629 - protein, 7 aa, ARTIFICIAL SEQUENCE
  Synthetic Construct
RSKSHTK

SEQ ID NO: 17630 - protein, 7 aa, ARTIFICIAL SEQUENCE
  Synthetic Construct
RSKSHYK

SEQ ID NO: 17631 - protein, 7 aa, ARTIFICIAL SEQUENCE
  Synthetic Construct
RSKSIAK

SEQ ID NO: 17632 - protein, 7 aa, ARTIFICIAL SEQUENCE
  Synthetic Construct
RSKSIDK

SEQ ID NO: 17633 - protein, 7 aa, ARTIFICIAL SEQUENCE
  Synthetic Construct
RSKSIEK

SEQ ID NO: 17634 - protein, 7 aa, ARTIFICIAL SEQUENCE
  Synthetic Construct
RSKSIFK

SEQ ID NO: 17635 - protein, 7 aa, ARTIFICIAL SEQUENCE
  Synthetic Construct
RSKSIGK

SEQ ID NO: 17636 - protein, 7 aa, ARTIFICIAL SEQUENCE
  Synthetic Construct
RSKSIHK

SEQ ID NO: 17637 - protein, 7 aa, ARTIFICIAL SEQUENCE
  Synthetic Construct
RSKSIIK

SEQ ID NO: 17638 - protein, 7 aa, ARTIFICIAL SEQUENCE
  Synthetic Construct
RSKSILK

SEQ ID NO: 17639 - protein, 7 aa, ARTIFICIAL SEQUENCE
  Synthetic Construct
RSKSINK

SEQ ID NO: 17640 - protein, 7 aa, ARTIFICIAL SEQUENCE
  Synthetic Construct
RSKSIQK

SEQ ID NO: 17641 - protein, 7 aa, ARTIFICIAL SEQUENCE
  Synthetic Construct
RSKSIRK

SEQ ID NO: 17642 - protein, 7 aa, ARTIFICIAL SEQUENCE
  Synthetic Construct
RSKSISK

SEQ ID NO: 17643 - protein, 7 aa, ARTIFICIAL SEQUENCE
  Synthetic Construct
RSKSITK

SEQ ID NO: 17644 - protein, 7 aa, ARTIFICIAL SEQUENCE
  Synthetic Construct
RSKSIYK

SEQ ID NO: 17645 - protein, 7 aa, ARTIFICIAL SEQUENCE
  Synthetic Construct
RSKSLAK

SEQ ID NO: 17646 - protein, 7 aa, ARTIFICIAL SEQUENCE
  Synthetic Construct
RSKSLDK

SEQ ID NO: 17647 - protein, 7 aa, ARTIFICIAL SEQUENCE
  Synthetic Construct
RSKSLEK

SEQ ID NO: 17648 - protein, 7 aa, ARTIFICIAL SEQUENCE
  Synthetic Construct
RSKSLFK

SEQ ID NO: 17649 - protein, 7 aa, ARTIFICIAL SEQUENCE
  Synthetic Construct
RSKSLGK

SEQ ID NO: 17650 - protein, 7 aa, ARTIFICIAL SEQUENCE
  Synthetic Construct
RSKSLHK

SEQ ID NO: 17651 - protein, 7 aa, ARTIFICIAL SEQUENCE
  Synthetic Construct
RSKSLIK

SEQ ID NO: 17652 - protein, 7 aa, ARTIFICIAL SEQUENCE
  Synthetic Construct
RSKSLLK

SEQ ID NO: 17653 - protein, 7 aa, ARTIFICIAL SEQUENCE
  Synthetic Construct
RSKSLNK

SEQ ID NO: 17654 - protein, 7 aa, ARTIFICIAL SEQUENCE
  Synthetic Construct
RSKSLQK

SEQ ID NO: 17655 - protein, 7 aa, ARTIFICIAL SEQUENCE
  Synthetic Construct
RSKSLRK

SEQ ID NO: 17656 - protein, 7 aa, ARTIFICIAL SEQUENCE
  Synthetic Construct
RSKSLSK

SEQ ID NO: 17657 - protein, 7 aa, ARTIFICIAL SEQUENCE
  Synthetic Construct
RSKSLTK

SEQ ID NO: 17658 - protein, 7 aa, ARTIFICIAL SEQUENCE
  Synthetic Construct
RSKSLYK

SEQ ID NO: 17659 - protein, 7 aa, ARTIFICIAL SEQUENCE
  Synthetic Construct
RSKSNAK

SEQ ID NO: 17660 - protein, 7 aa, ARTIFICIAL SEQUENCE
  Synthetic Construct
RSKSNDK

SEQ ID NO: 17661 - protein, 7 aa, ARTIFICIAL SEQUENCE
  Synthetic Construct
RSKSNEK

SEQ ID NO: 17662 - protein, 7 aa, ARTIFICIAL SEQUENCE
  Synthetic Construct
RSKSNFK

SEQ ID NO: 17663 - protein, 7 aa, ARTIFICIAL SEQUENCE
  Synthetic Construct
RSKSNGK

SEQ ID NO: 17664 - protein, 7 aa, ARTIFICIAL SEQUENCE
  Synthetic Construct
RSKSNHK

SEQ ID NO: 17665 - protein, 7 aa, ARTIFICIAL SEQUENCE
  Synthetic Construct
RSKSNIK

SEQ ID NO: 17666 - protein, 7 aa, ARTIFICIAL SEQUENCE
  Synthetic Construct
RSKSNLK

SEQ ID NO: 17667 - protein, 7 aa, ARTIFICIAL SEQUENCE
  Synthetic Construct
RSKSNNK

SEQ ID NO: 17668 - protein, 7 aa, ARTIFICIAL SEQUENCE
  Synthetic Construct
RSKSNQK

SEQ ID NO: 17669 - protein, 7 aa, ARTIFICIAL SEQUENCE
  Synthetic Construct
RSKSNRK

SEQ ID NO: 17670 - protein, 7 aa, ARTIFICIAL SEQUENCE
  Synthetic Construct
RSKSNSK

SEQ ID NO: 17671 - protein, 7 aa, ARTIFICIAL SEQUENCE
  Synthetic Construct
RSKSNTK

SEQ ID NO: 17672 - protein, 7 aa, ARTIFICIAL SEQUENCE
  Synthetic Construct
RSKSNYK

SEQ ID NO: 17673 - protein, 7 aa, ARTIFICIAL SEQUENCE
  Synthetic Construct
RSKSQAK

SEQ ID NO: 17674 - protein, 7 aa, ARTIFICIAL SEQUENCE
  Synthetic Construct
RSKSQDK

SEQ ID NO: 17675 - protein, 7 aa, ARTIFICIAL SEQUENCE
  Synthetic Construct
RSKSQEK

SEQ ID NO: 17676 - protein, 7 aa, ARTIFICIAL SEQUENCE
  Synthetic Construct
RSKSQFK

SEQ ID NO: 17677 - protein, 7 aa, ARTIFICIAL SEQUENCE
  Synthetic Construct
RSKSQGK

SEQ ID NO: 17678 - protein, 7 aa, ARTIFICIAL SEQUENCE
  Synthetic Construct
RSKSQHK

SEQ ID NO: 17679 - protein, 7 aa, ARTIFICIAL SEQUENCE
  Synthetic Construct
RSKSQIK

SEQ ID NO: 17680 - protein, 7 aa, ARTIFICIAL SEQUENCE
  Synthetic Construct
RSKSQLK

SEQ ID NO: 17681 - protein, 7 aa, ARTIFICIAL SEQUENCE
  Synthetic Construct
RSKSQNK

SEQ ID NO: 17682 - protein, 7 aa, ARTIFICIAL SEQUENCE
  Synthetic Construct
RSKSQQK

SEQ ID NO: 17683 - protein, 7 aa, ARTIFICIAL SEQUENCE
  Synthetic Construct
RSKSQRK

SEQ ID NO: 17684 - protein, 7 aa, ARTIFICIAL SEQUENCE
  Synthetic Construct
RSKSQSK

SEQ ID NO: 17685 - protein, 7 aa, ARTIFICIAL SEQUENCE
  Synthetic Construct
RSKSQTK

SEQ ID NO: 17686 - protein, 7 aa, ARTIFICIAL SEQUENCE
  Synthetic Construct
RSKSQYK

SEQ ID NO: 17687 - protein, 7 aa, ARTIFICIAL SEQUENCE
  Synthetic Construct
RSKSRAK

SEQ ID NO: 17688 - protein, 7 aa, ARTIFICIAL SEQUENCE
  Synthetic Construct
RSKSRDK

SEQ ID NO: 17689 - protein, 7 aa, ARTIFICIAL SEQUENCE
  Synthetic Construct
RSKSREK

SEQ ID NO: 17690 - protein, 7 aa, ARTIFICIAL SEQUENCE
  Synthetic Construct
RSKSRFK

SEQ ID NO: 17691 - protein, 7 aa, ARTIFICIAL SEQUENCE
  Synthetic Construct
RSKSRGK

SEQ ID NO: 17692 - protein, 7 aa, ARTIFICIAL SEQUENCE
  Synthetic Construct
RSKSRHK

SEQ ID NO: 17693 - protein, 7 aa, ARTIFICIAL SEQUENCE
  Synthetic Construct
RSKSRIK

SEQ ID NO: 17694 - protein, 7 aa, ARTIFICIAL SEQUENCE
  Synthetic Construct
RSKSRLK

SEQ ID NO: 17695 - protein, 7 aa, ARTIFICIAL SEQUENCE
  Synthetic Construct
RSKSRNK

SEQ ID NO: 17696 - protein, 7 aa, ARTIFICIAL SEQUENCE
  Synthetic Construct
RSKSRQK

SEQ ID NO: 17697 - protein, 7 aa, ARTIFICIAL SEQUENCE
  Synthetic Construct
RSKSRRK

SEQ ID NO: 17698 - protein, 7 aa, ARTIFICIAL SEQUENCE
  Synthetic Construct
RSKSRSK

SEQ ID NO: 17699 - protein, 7 aa, ARTIFICIAL SEQUENCE
  Synthetic Construct
RSKSRTK

SEQ ID NO: 17700 - protein, 7 aa, ARTIFICIAL SEQUENCE
  Synthetic Construct
RSKSRYK

SEQ ID NO: 17701 - protein, 7 aa, ARTIFICIAL SEQUENCE
  Synthetic Construct
RSKSSAK

SEQ ID NO: 17702 - protein, 7 aa, ARTIFICIAL SEQUENCE
  Synthetic Construct
RSKSSDK

SEQ ID NO: 17703 - protein, 7 aa, ARTIFICIAL SEQUENCE
  Synthetic Construct
RSKSSEK

SEQ ID NO: 17704 - protein, 7 aa, ARTIFICIAL SEQUENCE
  Synthetic Construct
RSKSSFK

SEQ ID NO: 17705 - protein, 7 aa, ARTIFICIAL SEQUENCE
  Synthetic Construct
RSKSSGK

SEQ ID NO: 17706 - protein, 7 aa, ARTIFICIAL SEQUENCE
  Synthetic Construct
RSKSSHK

SEQ ID NO: 17707 - protein, 7 aa, ARTIFICIAL SEQUENCE
  Synthetic Construct
RSKSSIK

SEQ ID NO: 17708 - protein, 7 aa, ARTIFICIAL SEQUENCE
  Synthetic Construct
RSKSSLK

SEQ ID NO: 17709 - protein, 7 aa, ARTIFICIAL SEQUENCE
  Synthetic Construct
RSKSSNK

SEQ ID NO: 17710 - protein, 7 aa, ARTIFICIAL SEQUENCE
  Synthetic Construct
RSKSSQK

SEQ ID NO: 17711 - protein, 7 aa, ARTIFICIAL SEQUENCE
  Synthetic Construct
RSKSSRK

SEQ ID NO: 17712 - protein, 7 aa, ARTIFICIAL SEQUENCE
  Synthetic Construct
RSKSSSK

SEQ ID NO: 17713 - protein, 7 aa, ARTIFICIAL SEQUENCE
  Synthetic Construct
RSKSSTK

SEQ ID NO: 17714 - protein, 7 aa, ARTIFICIAL SEQUENCE
  Synthetic Construct
RSKSSYK

SEQ ID NO: 17715 - protein, 7 aa, ARTIFICIAL SEQUENCE
  Synthetic Construct
RSKSTAK

SEQ ID NO: 17716 - protein, 7 aa, ARTIFICIAL SEQUENCE
  Synthetic Construct
RSKSTDK

SEQ ID NO: 17717 - protein, 7 aa, ARTIFICIAL SEQUENCE
  Synthetic Construct
RSKSTEK

SEQ ID NO: 17718 - protein, 7 aa, ARTIFICIAL SEQUENCE
  Synthetic Construct
RSKSTFK

SEQ ID NO: 17719 - protein, 7 aa, ARTIFICIAL SEQUENCE
  Synthetic Construct
RSKSTGK

SEQ ID NO: 17720 - protein, 7 aa, ARTIFICIAL SEQUENCE
  Synthetic Construct
RSKSTHK

SEQ ID NO: 17721 - protein, 7 aa, ARTIFICIAL SEQUENCE
  Synthetic Construct
RSKSTIK

SEQ ID NO: 17722 - protein, 7 aa, ARTIFICIAL SEQUENCE
  Synthetic Construct
RSKSTLK

SEQ ID NO: 17723 - protein, 7 aa, ARTIFICIAL SEQUENCE
  Synthetic Construct
RSKSTNK

SEQ ID NO: 17724 - protein, 7 aa, ARTIFICIAL SEQUENCE
  Synthetic Construct
RSKSTQK

SEQ ID NO: 17725 - protein, 7 aa, ARTIFICIAL SEQUENCE
  Synthetic Construct
RSKSTRK

SEQ ID NO: 17726 - protein, 7 aa, ARTIFICIAL SEQUENCE
  Synthetic Construct
RSKSTSK

SEQ ID NO: 17727 - protein, 7 aa, ARTIFICIAL SEQUENCE
  Synthetic Construct
RSKSTTK

SEQ ID NO: 17728 - protein, 7 aa, ARTIFICIAL SEQUENCE
  Synthetic Construct
RSKSTYK

SEQ ID NO: 17729 - protein, 7 aa, ARTIFICIAL SEQUENCE
  Synthetic Construct
RSKSYAK

SEQ ID NO: 17730 - protein, 7 aa, ARTIFICIAL SEQUENCE
  Synthetic Construct
RSKSYDK

SEQ ID NO: 17731 - protein, 7 aa, ARTIFICIAL SEQUENCE
  Synthetic Construct
RSKSYEK

SEQ ID NO: 17732 - protein, 7 aa, ARTIFICIAL SEQUENCE
  Synthetic Construct
RSKSYFK

SEQ ID NO: 17733 - protein, 7 aa, ARTIFICIAL SEQUENCE
  Synthetic Construct
RSKSYGK

SEQ ID NO: 17734 - protein, 7 aa, ARTIFICIAL SEQUENCE
  Synthetic Construct
RSKSYHK

SEQ ID NO: 17735 - protein, 7 aa, ARTIFICIAL SEQUENCE
  Synthetic Construct
RSKSYIK

SEQ ID NO: 17736 - protein, 7 aa, ARTIFICIAL SEQUENCE
  Synthetic Construct
RSKSYLK

SEQ ID NO: 17737 - protein, 7 aa, ARTIFICIAL SEQUENCE
  Synthetic Construct
RSKSYNK

SEQ ID NO: 17738 - protein, 7 aa, ARTIFICIAL SEQUENCE
  Synthetic Construct
RSKSYQK

SEQ ID NO: 17739 - protein, 7 aa, ARTIFICIAL SEQUENCE
  Synthetic Construct
RSKSYRK

SEQ ID NO: 17740 - protein, 7 aa, ARTIFICIAL SEQUENCE
  Synthetic Construct
RSKSYSK

SEQ ID NO: 17741 - protein, 7 aa, ARTIFICIAL SEQUENCE
  Synthetic Construct
RSKSYTK

SEQ ID NO: 17742 - protein, 7 aa, ARTIFICIAL SEQUENCE
  Synthetic Construct
RSKSYYK

SEQ ID NO: 17743 - protein, 7 aa, ARTIFICIAL SEQUENCE
  Synthetic Construct
RSKTAAK

SEQ ID NO: 17744 - protein, 7 aa, ARTIFICIAL SEQUENCE
  Synthetic Construct
RSKTADK

SEQ ID NO: 17745 - protein, 7 aa, ARTIFICIAL SEQUENCE
  Synthetic Construct
RSKTAEK

SEQ ID NO: 17746 - protein, 7 aa, ARTIFICIAL SEQUENCE
  Synthetic Construct
RSKTAFK

SEQ ID NO: 17747 - protein, 7 aa, ARTIFICIAL SEQUENCE
  Synthetic Construct
RSKTAGK

SEQ ID NO: 17748 - protein, 7 aa, ARTIFICIAL SEQUENCE
  Synthetic Construct
RSKTAHK

SEQ ID NO: 17749 - protein, 7 aa, ARTIFICIAL SEQUENCE
  Synthetic Construct
RSKTAIK

SEQ ID NO: 17750 - protein, 7 aa, ARTIFICIAL SEQUENCE
  Synthetic Construct
RSKTALK

SEQ ID NO: 17751 - protein, 7 aa, ARTIFICIAL SEQUENCE
  Synthetic Construct
RSKTANK

SEQ ID NO: 17752 - protein, 7 aa, ARTIFICIAL SEQUENCE
  Synthetic Construct
RSKTAQK

SEQ ID NO: 17753 - protein, 7 aa, ARTIFICIAL SEQUENCE
  Synthetic Construct
RSKTARK

SEQ ID NO: 17754 - protein, 7 aa, ARTIFICIAL SEQUENCE
  Synthetic Construct
RSKTASK

SEQ ID NO: 17755 - protein, 7 aa, ARTIFICIAL SEQUENCE
  Synthetic Construct
RSKTATK

SEQ ID NO: 17756 - protein, 7 aa, ARTIFICIAL SEQUENCE
  Synthetic Construct
RSKTAYK

SEQ ID NO: 17757 - protein, 7 aa, ARTIFICIAL SEQUENCE
  Synthetic Construct
RSKTDAK

SEQ ID NO: 17758 - protein, 7 aa, ARTIFICIAL SEQUENCE
  Synthetic Construct
RSKTDDK

SEQ ID NO: 17759 - protein, 7 aa, ARTIFICIAL SEQUENCE
  Synthetic Construct
RSKTDEK

SEQ ID NO: 17760 - protein, 7 aa, ARTIFICIAL SEQUENCE
  Synthetic Construct
RSKTDFK

SEQ ID NO: 17761 - protein, 7 aa, ARTIFICIAL SEQUENCE
  Synthetic Construct
RSKTDGK

SEQ ID NO: 17762 - protein, 7 aa, ARTIFICIAL SEQUENCE
  Synthetic Construct
RSKTDHK

SEQ ID NO: 17763 - protein, 7 aa, ARTIFICIAL SEQUENCE
  Synthetic Construct
RSKTDIK

SEQ ID NO: 17764 - protein, 7 aa, ARTIFICIAL SEQUENCE
  Synthetic Construct
RSKTDLK

SEQ ID NO: 17765 - protein, 7 aa, ARTIFICIAL SEQUENCE
  Synthetic Construct
RSKTDNK

SEQ ID NO: 17766 - protein, 7 aa, ARTIFICIAL SEQUENCE
  Synthetic Construct
RSKTDQK

SEQ ID NO: 17767 - protein, 7 aa, ARTIFICIAL SEQUENCE
  Synthetic Construct
RSKTDRK

SEQ ID NO: 17768 - protein, 7 aa, ARTIFICIAL SEQUENCE
  Synthetic Construct
RSKTDSK

SEQ ID NO: 17769 - protein, 7 aa, ARTIFICIAL SEQUENCE
  Synthetic Construct
RSKTDTK

SEQ ID NO: 17770 - protein, 7 aa, ARTIFICIAL SEQUENCE
  Synthetic Construct
RSKTDYK

SEQ ID NO: 17771 - protein, 7 aa, ARTIFICIAL SEQUENCE
  Synthetic Construct
RSKTEAK

SEQ ID NO: 17772 - protein, 7 aa, ARTIFICIAL SEQUENCE
  Synthetic Construct
RSKTEDK

SEQ ID NO: 17773 - protein, 7 aa, ARTIFICIAL SEQUENCE
  Synthetic Construct
RSKTEEK

SEQ ID NO: 17774 - protein, 7 aa, ARTIFICIAL SEQUENCE
  Synthetic Construct
RSKTEFK

SEQ ID NO: 17775 - protein, 7 aa, ARTIFICIAL SEQUENCE
  Synthetic Construct
RSKTEGK

SEQ ID NO: 17776 - protein, 7 aa, ARTIFICIAL SEQUENCE
  Synthetic Construct
RSKTEHK

SEQ ID NO: 17777 - protein, 7 aa, ARTIFICIAL SEQUENCE
  Synthetic Construct
RSKTEIK

SEQ ID NO: 17778 - protein, 7 aa, ARTIFICIAL SEQUENCE
  Synthetic Construct
RSKTELK

SEQ ID NO: 17779 - protein, 7 aa, ARTIFICIAL SEQUENCE
  Synthetic Construct
RSKTENK

SEQ ID NO: 17780 - protein, 7 aa, ARTIFICIAL SEQUENCE
  Synthetic Construct
RSKTEQK

SEQ ID NO: 17781 - protein, 7 aa, ARTIFICIAL SEQUENCE
  Synthetic Construct
RSKTERK

SEQ ID NO: 17782 - protein, 7 aa, ARTIFICIAL SEQUENCE
  Synthetic Construct
RSKTESK

SEQ ID NO: 17783 - protein, 7 aa, ARTIFICIAL SEQUENCE
  Synthetic Construct
RSKTETK

SEQ ID NO: 17784 - protein, 7 aa, ARTIFICIAL SEQUENCE
  Synthetic Construct
RSKTEYK

SEQ ID NO: 17785 - protein, 7 aa, ARTIFICIAL SEQUENCE
  Synthetic Construct
RSKTFAK

SEQ ID NO: 17786 - protein, 7 aa, ARTIFICIAL SEQUENCE
  Synthetic Construct
RSKTFDK

SEQ ID NO: 17787 - protein, 7 aa, ARTIFICIAL SEQUENCE
  Synthetic Construct
RSKTFEK

SEQ ID NO: 17788 - protein, 7 aa, ARTIFICIAL SEQUENCE
  Synthetic Construct
RSKTFFK

SEQ ID NO: 17789 - protein, 7 aa, ARTIFICIAL SEQUENCE
  Synthetic Construct
RSKTFGK

SEQ ID NO: 17790 - protein, 7 aa, ARTIFICIAL SEQUENCE
  Synthetic Construct
RSKTFHK

SEQ ID NO: 17791 - protein, 7 aa, ARTIFICIAL SEQUENCE
  Synthetic Construct
RSKTFIK

SEQ ID NO: 17792 - protein, 7 aa, ARTIFICIAL SEQUENCE
  Synthetic Construct
RSKTFLK

SEQ ID NO: 17793 - protein, 7 aa, ARTIFICIAL SEQUENCE
  Synthetic Construct
RSKTFNK

SEQ ID NO: 17794 - protein, 7 aa, ARTIFICIAL SEQUENCE
  Synthetic Construct
RSKTFQK

SEQ ID NO: 17795 - protein, 7 aa, ARTIFICIAL SEQUENCE
  Synthetic Construct
RSKTFRK

SEQ ID NO: 17796 - protein, 7 aa, ARTIFICIAL SEQUENCE
  Synthetic Construct
RSKTFSK

SEQ ID NO: 17797 - protein, 7 aa, ARTIFICIAL SEQUENCE
  Synthetic Construct
RSKTFTK

SEQ ID NO: 17798 - protein, 7 aa, ARTIFICIAL SEQUENCE
  Synthetic Construct
RSKTFYK

SEQ ID NO: 17799 - protein, 7 aa, ARTIFICIAL SEQUENCE
  Synthetic Construct
RSKTGAK

SEQ ID NO: 17800 - protein, 7 aa, ARTIFICIAL SEQUENCE
  Synthetic Construct
RSKTGDK

SEQ ID NO: 17801 - protein, 7 aa, ARTIFICIAL SEQUENCE
  Synthetic Construct
RSKTGEK

SEQ ID NO: 17802 - protein, 7 aa, ARTIFICIAL SEQUENCE
  Synthetic Construct
RSKTGFK

SEQ ID NO: 17803 - protein, 7 aa, ARTIFICIAL SEQUENCE
  Synthetic Construct
RSKTGGK

SEQ ID NO: 17804 - protein, 7 aa, ARTIFICIAL SEQUENCE
  Synthetic Construct
RSKTGHK

SEQ ID NO: 17805 - protein, 7 aa, ARTIFICIAL SEQUENCE
  Synthetic Construct
RSKTGIK

SEQ ID NO: 17806 - protein, 7 aa, ARTIFICIAL SEQUENCE
  Synthetic Construct
RSKTGLK

SEQ ID NO: 17807 - protein, 7 aa, ARTIFICIAL SEQUENCE
  Synthetic Construct
RSKTGNK

SEQ ID NO: 17808 - protein, 7 aa, ARTIFICIAL SEQUENCE
  Synthetic Construct
RSKTGQK

SEQ ID NO: 17809 - protein, 7 aa, ARTIFICIAL SEQUENCE
  Synthetic Construct
RSKTGRK

SEQ ID NO: 17810 - protein, 7 aa, ARTIFICIAL SEQUENCE
  Synthetic Construct
RSKTGSK

SEQ ID NO: 17811 - protein, 7 aa, ARTIFICIAL SEQUENCE
  Synthetic Construct
RSKTGTK

SEQ ID NO: 17812 - protein, 7 aa, ARTIFICIAL SEQUENCE
  Synthetic Construct
RSKTGYK

SEQ ID NO: 17813 - protein, 7 aa, ARTIFICIAL SEQUENCE
  Synthetic Construct
RSKTHAK

SEQ ID NO: 17814 - protein, 7 aa, ARTIFICIAL SEQUENCE
  Synthetic Construct
RSKTHDK

SEQ ID NO: 17815 - protein, 7 aa, ARTIFICIAL SEQUENCE
  Synthetic Construct
RSKTHEK

SEQ ID NO: 17816 - protein, 7 aa, ARTIFICIAL SEQUENCE
  Synthetic Construct
RSKTHFK

SEQ ID NO: 17817 - protein, 7 aa, ARTIFICIAL SEQUENCE
  Synthetic Construct
RSKTHGK

SEQ ID NO: 17818 - protein, 7 aa, ARTIFICIAL SEQUENCE
  Synthetic Construct
RSKTHHK

SEQ ID NO: 17819 - protein, 7 aa, ARTIFICIAL SEQUENCE
  Synthetic Construct
RSKTHIK

SEQ ID NO: 17820 - protein, 7 aa, ARTIFICIAL SEQUENCE
  Synthetic Construct
RSKTHLK

SEQ ID NO: 17821 - protein, 7 aa, ARTIFICIAL SEQUENCE
  Synthetic Construct
RSKTHNK

SEQ ID NO: 17822 - protein, 7 aa, ARTIFICIAL SEQUENCE
  Synthetic Construct
RSKTHQK

SEQ ID NO: 17823 - protein, 7 aa, ARTIFICIAL SEQUENCE
  Synthetic Construct
RSKTHRK

SEQ ID NO: 17824 - protein, 7 aa, ARTIFICIAL SEQUENCE
  Synthetic Construct
RSKTHSK

SEQ ID NO: 17825 - protein, 7 aa, ARTIFICIAL SEQUENCE
  Synthetic Construct
RSKTHTK

SEQ ID NO: 17826 - protein, 7 aa, ARTIFICIAL SEQUENCE
  Synthetic Construct
RSKTHYK

SEQ ID NO: 17827 - protein, 7 aa, ARTIFICIAL SEQUENCE
  Synthetic Construct
RSKTIAK

SEQ ID NO: 17828 - protein, 7 aa, ARTIFICIAL SEQUENCE
  Synthetic Construct
RSKTIDK

SEQ ID NO: 17829 - protein, 7 aa, ARTIFICIAL SEQUENCE
  Synthetic Construct
RSKTIEK

SEQ ID NO: 17830 - protein, 7 aa, ARTIFICIAL SEQUENCE
  Synthetic Construct
RSKTIFK

SEQ ID NO: 17831 - protein, 7 aa, ARTIFICIAL SEQUENCE
  Synthetic Construct
RSKTIGK

SEQ ID NO: 17832 - protein, 7 aa, ARTIFICIAL SEQUENCE
  Synthetic Construct
RSKTIHK

SEQ ID NO: 17833 - protein, 7 aa, ARTIFICIAL SEQUENCE
  Synthetic Construct
RSKTIIK

SEQ ID NO: 17834 - protein, 7 aa, ARTIFICIAL SEQUENCE
  Synthetic Construct
RSKTILK

SEQ ID NO: 17835 - protein, 7 aa, ARTIFICIAL SEQUENCE
  Synthetic Construct
RSKTINK

SEQ ID NO: 17836 - protein, 7 aa, ARTIFICIAL SEQUENCE
  Synthetic Construct
RSKTIQK

SEQ ID NO: 17837 - protein, 7 aa, ARTIFICIAL SEQUENCE
  Synthetic Construct
RSKTIRK

SEQ ID NO: 17838 - protein, 7 aa, ARTIFICIAL SEQUENCE
  Synthetic Construct
RSKTISK

SEQ ID NO: 17839 - protein, 7 aa, ARTIFICIAL SEQUENCE
  Synthetic Construct
RSKTITK

SEQ ID NO: 17840 - protein, 7 aa, ARTIFICIAL SEQUENCE
  Synthetic Construct
RSKTIYK

SEQ ID NO: 17841 - protein, 7 aa, ARTIFICIAL SEQUENCE
  Synthetic Construct
RSKTLAK

SEQ ID NO: 17842 - protein, 7 aa, ARTIFICIAL SEQUENCE
  Synthetic Construct
RSKTLDK

SEQ ID NO: 17843 - protein, 7 aa, ARTIFICIAL SEQUENCE
  Synthetic Construct
RSKTLEK

SEQ ID NO: 17844 - protein, 7 aa, ARTIFICIAL SEQUENCE
  Synthetic Construct
RSKTLFK

SEQ ID NO: 17845 - protein, 7 aa, ARTIFICIAL SEQUENCE
  Synthetic Construct
RSKTLGK

SEQ ID NO: 17846 - protein, 7 aa, ARTIFICIAL SEQUENCE
  Synthetic Construct
RSKTLHK

SEQ ID NO: 17847 - protein, 7 aa, ARTIFICIAL SEQUENCE
  Synthetic Construct
RSKTLIK

SEQ ID NO: 17848 - protein, 7 aa, ARTIFICIAL SEQUENCE
  Synthetic Construct
RSKTLLK

SEQ ID NO: 17849 - protein, 7 aa, ARTIFICIAL SEQUENCE
  Synthetic Construct
RSKTLNK

SEQ ID NO: 17850 - protein, 7 aa, ARTIFICIAL SEQUENCE
  Synthetic Construct
RSKTLQK

SEQ ID NO: 17851 - protein, 7 aa, ARTIFICIAL SEQUENCE
  Synthetic Construct
RSKTLRK

SEQ ID NO: 17852 - protein, 7 aa, ARTIFICIAL SEQUENCE
  Synthetic Construct
RSKTLSK

SEQ ID NO: 17853 - protein, 7 aa, ARTIFICIAL SEQUENCE
  Synthetic Construct
RSKTLTK

SEQ ID NO: 17854 - protein, 7 aa, ARTIFICIAL SEQUENCE
  Synthetic Construct
RSKTLYK

SEQ ID NO: 17855 - protein, 7 aa, ARTIFICIAL SEQUENCE
  Synthetic Construct
RSKTNAK

SEQ ID NO: 17856 - protein, 7 aa, ARTIFICIAL SEQUENCE
  Synthetic Construct
RSKTNDK

SEQ ID NO: 17857 - protein, 7 aa, ARTIFICIAL SEQUENCE
  Synthetic Construct
RSKTNEK

SEQ ID NO: 17858 - protein, 7 aa, ARTIFICIAL SEQUENCE
  Synthetic Construct
RSKTNFK

SEQ ID NO: 17859 - protein, 7 aa, ARTIFICIAL SEQUENCE
  Synthetic Construct
RSKTNGK

SEQ ID NO: 17860 - protein, 7 aa, ARTIFICIAL SEQUENCE
  Synthetic Construct
RSKTNHK

SEQ ID NO: 17861 - protein, 7 aa, ARTIFICIAL SEQUENCE
  Synthetic Construct
RSKTNIK

SEQ ID NO: 17862 - protein, 7 aa, ARTIFICIAL SEQUENCE
  Synthetic Construct
RSKTNLK

SEQ ID NO: 17863 - protein, 7 aa, ARTIFICIAL SEQUENCE
  Synthetic Construct
RSKTNNK

SEQ ID NO: 17864 - protein, 7 aa, ARTIFICIAL SEQUENCE
  Synthetic Construct
RSKTNQK

SEQ ID NO: 17865 - protein, 7 aa, ARTIFICIAL SEQUENCE
  Synthetic Construct
RSKTNRK

SEQ ID NO: 17866 - protein, 7 aa, ARTIFICIAL SEQUENCE
  Synthetic Construct
RSKTNSK

SEQ ID NO: 17867 - protein, 7 aa, ARTIFICIAL SEQUENCE
  Synthetic Construct
RSKTNTK

SEQ ID NO: 17868 - protein, 7 aa, ARTIFICIAL SEQUENCE
  Synthetic Construct
RSKTNYK

SEQ ID NO: 17869 - protein, 7 aa, ARTIFICIAL SEQUENCE
  Synthetic Construct
RSKTQAK

SEQ ID NO: 17870 - protein, 7 aa, ARTIFICIAL SEQUENCE
  Synthetic Construct
RSKTQDK

SEQ ID NO: 17871 - protein, 7 aa, ARTIFICIAL SEQUENCE
  Synthetic Construct
RSKTQEK

SEQ ID NO: 17872 - protein, 7 aa, ARTIFICIAL SEQUENCE
  Synthetic Construct
RSKTQFK

SEQ ID NO: 17873 - protein, 7 aa, ARTIFICIAL SEQUENCE
  Synthetic Construct
RSKTQGK

SEQ ID NO: 17874 - protein, 7 aa, ARTIFICIAL SEQUENCE
  Synthetic Construct
RSKTQHK

SEQ ID NO: 17875 - protein, 7 aa, ARTIFICIAL SEQUENCE
  Synthetic Construct
RSKTQIK

SEQ ID NO: 17876 - protein, 7 aa, ARTIFICIAL SEQUENCE
  Synthetic Construct
RSKTQLK

SEQ ID NO: 17877 - protein, 7 aa, ARTIFICIAL SEQUENCE
  Synthetic Construct
RSKTQNK

SEQ ID NO: 17878 - protein, 7 aa, ARTIFICIAL SEQUENCE
  Synthetic Construct
RSKTQQK

SEQ ID NO: 17879 - protein, 7 aa, ARTIFICIAL SEQUENCE
  Synthetic Construct
RSKTQRK

SEQ ID NO: 17880 - protein, 7 aa, ARTIFICIAL SEQUENCE
  Synthetic Construct
RSKTQSK

SEQ ID NO: 17881 - protein, 7 aa, ARTIFICIAL SEQUENCE
  Synthetic Construct
RSKTQTK

SEQ ID NO: 17882 - protein, 7 aa, ARTIFICIAL SEQUENCE
  Synthetic Construct
RSKTQYK

SEQ ID NO: 17883 - protein, 7 aa, ARTIFICIAL SEQUENCE
  Synthetic Construct
RSKTRAK

SEQ ID NO: 17884 - protein, 7 aa, ARTIFICIAL SEQUENCE
  Synthetic Construct
RSKTRDK

SEQ ID NO: 17885 - protein, 7 aa, ARTIFICIAL SEQUENCE
  Synthetic Construct
RSKTREK

SEQ ID NO: 17886 - protein, 7 aa, ARTIFICIAL SEQUENCE
  Synthetic Construct
RSKTRFK

SEQ ID NO: 17887 - protein, 7 aa, ARTIFICIAL SEQUENCE
  Synthetic Construct
RSKTRGK

SEQ ID NO: 17888 - protein, 7 aa, ARTIFICIAL SEQUENCE
  Synthetic Construct
RSKTRHK

SEQ ID NO: 17889 - protein, 7 aa, ARTIFICIAL SEQUENCE
  Synthetic Construct
RSKTRIK

SEQ ID NO: 17890 - protein, 7 aa, ARTIFICIAL SEQUENCE
  Synthetic Construct
RSKTRLK

SEQ ID NO: 17891 - protein, 7 aa, ARTIFICIAL SEQUENCE
  Synthetic Construct
RSKTRNK

SEQ ID NO: 17892 - protein, 7 aa, ARTIFICIAL SEQUENCE
  Synthetic Construct
RSKTRQK

SEQ ID NO: 17893 - protein, 7 aa, ARTIFICIAL SEQUENCE
  Synthetic Construct
RSKTRRK

SEQ ID NO: 17894 - protein, 7 aa, ARTIFICIAL SEQUENCE
  Synthetic Construct
RSKTRSK

SEQ ID NO: 17895 - protein, 7 aa, ARTIFICIAL SEQUENCE
  Synthetic Construct
RSKTRTK

SEQ ID NO: 17896 - protein, 7 aa, ARTIFICIAL SEQUENCE
  Synthetic Construct
RSKTRYK

SEQ ID NO: 17897 - protein, 7 aa, ARTIFICIAL SEQUENCE
  Synthetic Construct
RSKTSAK

SEQ ID NO: 17898 - protein, 7 aa, ARTIFICIAL SEQUENCE
  Synthetic Construct
RSKTSDK

SEQ ID NO: 17899 - protein, 7 aa, ARTIFICIAL SEQUENCE
  Synthetic Construct
RSKTSEK

SEQ ID NO: 17900 - protein, 7 aa, ARTIFICIAL SEQUENCE
  Synthetic Construct
RSKTSFK

SEQ ID NO: 17901 - protein, 7 aa, ARTIFICIAL SEQUENCE
  Synthetic Construct
RSKTSGK

SEQ ID NO: 17902 - protein, 7 aa, ARTIFICIAL SEQUENCE
  Synthetic Construct
RSKTSHK

SEQ ID NO: 17903 - protein, 7 aa, ARTIFICIAL SEQUENCE
  Synthetic Construct
RSKTSIK

SEQ ID NO: 17904 - protein, 7 aa, ARTIFICIAL SEQUENCE
  Synthetic Construct
RSKTSLK

SEQ ID NO: 17905 - protein, 7 aa, ARTIFICIAL SEQUENCE
  Synthetic Construct
RSKTSNK

SEQ ID NO: 17906 - protein, 7 aa, ARTIFICIAL SEQUENCE
  Synthetic Construct
RSKTSQK

SEQ ID NO: 17907 - protein, 7 aa, ARTIFICIAL SEQUENCE
  Synthetic Construct
RSKTSRK

SEQ ID NO: 17908 - protein, 7 aa, ARTIFICIAL SEQUENCE
  Synthetic Construct
RSKTSSK

SEQ ID NO: 17909 - protein, 7 aa, ARTIFICIAL SEQUENCE
  Synthetic Construct
RSKTSTK

SEQ ID NO: 17910 - protein, 7 aa, ARTIFICIAL SEQUENCE
  Synthetic Construct
RSKTSYK

SEQ ID NO: 17911 - protein, 7 aa, ARTIFICIAL SEQUENCE
  Synthetic Construct
RSKTTAK

SEQ ID NO: 17912 - protein, 7 aa, ARTIFICIAL SEQUENCE
  Synthetic Construct
RSKTTDK

SEQ ID NO: 17913 - protein, 7 aa, ARTIFICIAL SEQUENCE
  Synthetic Construct
RSKTTEK

SEQ ID NO: 17914 - protein, 7 aa, ARTIFICIAL SEQUENCE
  Synthetic Construct
RSKTTFK

SEQ ID NO: 17915 - protein, 7 aa, ARTIFICIAL SEQUENCE
  Synthetic Construct
RSKTTGK

SEQ ID NO: 17916 - protein, 7 aa, ARTIFICIAL SEQUENCE
  Synthetic Construct
RSKTTHK

SEQ ID NO: 17917 - protein, 7 aa, ARTIFICIAL SEQUENCE
  Synthetic Construct
RSKTTIK

SEQ ID NO: 17918 - protein, 7 aa, ARTIFICIAL SEQUENCE
  Synthetic Construct
RSKTTLK

SEQ ID NO: 17919 - protein, 7 aa, ARTIFICIAL SEQUENCE
  Synthetic Construct
RSKTTNK

SEQ ID NO: 17920 - protein, 7 aa, ARTIFICIAL SEQUENCE
  Synthetic Construct
RSKTTQK

SEQ ID NO: 17921 - protein, 7 aa, ARTIFICIAL SEQUENCE
  Synthetic Construct
RSKTTRK

SEQ ID NO: 17922 - protein, 7 aa, ARTIFICIAL SEQUENCE
  Synthetic Construct
RSKTTSK

SEQ ID NO: 17923 - protein, 7 aa, ARTIFICIAL SEQUENCE
  Synthetic Construct
RSKTTTK

SEQ ID NO: 17924 - protein, 7 aa, ARTIFICIAL SEQUENCE
  Synthetic Construct
RSKTTYK

SEQ ID NO: 17925 - protein, 7 aa, ARTIFICIAL SEQUENCE
  Synthetic Construct
RSKTYAK

SEQ ID NO: 17926 - protein, 7 aa, ARTIFICIAL SEQUENCE
  Synthetic Construct
RSKTYDK

SEQ ID NO: 17927 - protein, 7 aa, ARTIFICIAL SEQUENCE
  Synthetic Construct
RSKTYEK

SEQ ID NO: 17928 - protein, 7 aa, ARTIFICIAL SEQUENCE
  Synthetic Construct
RSKTYFK

SEQ ID NO: 17929 - protein, 7 aa, ARTIFICIAL SEQUENCE
  Synthetic Construct
RSKTYGK

SEQ ID NO: 17930 - protein, 7 aa, ARTIFICIAL SEQUENCE
  Synthetic Construct
RSKTYHK

SEQ ID NO: 17931 - protein, 7 aa, ARTIFICIAL SEQUENCE
  Synthetic Construct
RSKTYIK

SEQ ID NO: 17932 - protein, 7 aa, ARTIFICIAL SEQUENCE
  Synthetic Construct
RSKTYLK

SEQ ID NO: 17933 - protein, 7 aa, ARTIFICIAL SEQUENCE
  Synthetic Construct
RSKTYNK

SEQ ID NO: 17934 - protein, 7 aa, ARTIFICIAL SEQUENCE
  Synthetic Construct
RSKTYQK

SEQ ID NO: 17935 - protein, 7 aa, ARTIFICIAL SEQUENCE
  Synthetic Construct
RSKTYRK

SEQ ID NO: 17936 - protein, 7 aa, ARTIFICIAL SEQUENCE
  Synthetic Construct
RSKTYSK

SEQ ID NO: 17937 - protein, 7 aa, ARTIFICIAL SEQUENCE
  Synthetic Construct
RSKTYTK

SEQ ID NO: 17938 - protein, 7 aa, ARTIFICIAL SEQUENCE
  Synthetic Construct
RSKTYYK

SEQ ID NO: 17939 - protein, 7 aa, ARTIFICIAL SEQUENCE
  Synthetic Construct
RSKYAAK

SEQ ID NO: 17940 - protein, 7 aa, ARTIFICIAL SEQUENCE
  Synthetic Construct
RSKYADK

SEQ ID NO: 17941 - protein, 7 aa, ARTIFICIAL SEQUENCE
  Synthetic Construct
RSKYAEK

SEQ ID NO: 17942 - protein, 7 aa, ARTIFICIAL SEQUENCE
  Synthetic Construct
RSKYAFK

SEQ ID NO: 17943 - protein, 7 aa, ARTIFICIAL SEQUENCE
  Synthetic Construct
RSKYAGK

SEQ ID NO: 17944 - protein, 7 aa, ARTIFICIAL SEQUENCE
  Synthetic Construct
RSKYAHK

SEQ ID NO: 17945 - protein, 7 aa, ARTIFICIAL SEQUENCE
  Synthetic Construct
RSKYAIK

SEQ ID NO: 17946 - protein, 7 aa, ARTIFICIAL SEQUENCE
  Synthetic Construct
RSKYALK

SEQ ID NO: 17947 - protein, 7 aa, ARTIFICIAL SEQUENCE
  Synthetic Construct
RSKYANK

SEQ ID NO: 17948 - protein, 7 aa, ARTIFICIAL SEQUENCE
  Synthetic Construct
RSKYAQK

SEQ ID NO: 17949 - protein, 7 aa, ARTIFICIAL SEQUENCE
  Synthetic Construct
RSKYARK

SEQ ID NO: 17950 - protein, 7 aa, ARTIFICIAL SEQUENCE
  Synthetic Construct
RSKYASK

SEQ ID NO: 17951 - protein, 7 aa, ARTIFICIAL SEQUENCE
  Synthetic Construct
RSKYATK

SEQ ID NO: 17952 - protein, 7 aa, ARTIFICIAL SEQUENCE
  Synthetic Construct
RSKYAYK

SEQ ID NO: 17953 - protein, 7 aa, ARTIFICIAL SEQUENCE
  Synthetic Construct
RSKYDAK

SEQ ID NO: 17954 - protein, 7 aa, ARTIFICIAL SEQUENCE
  Synthetic Construct
RSKYDDK

SEQ ID NO: 17955 - protein, 7 aa, ARTIFICIAL SEQUENCE
  Synthetic Construct
RSKYDEK

SEQ ID NO: 17956 - protein, 7 aa, ARTIFICIAL SEQUENCE
  Synthetic Construct
RSKYDFK

SEQ ID NO: 17957 - protein, 7 aa, ARTIFICIAL SEQUENCE
  Synthetic Construct
RSKYDGK

SEQ ID NO: 17958 - protein, 7 aa, ARTIFICIAL SEQUENCE
  Synthetic Construct
RSKYDHK

SEQ ID NO: 17959 - protein, 7 aa, ARTIFICIAL SEQUENCE
  Synthetic Construct
RSKYDIK

SEQ ID NO: 17960 - protein, 7 aa, ARTIFICIAL SEQUENCE
  Synthetic Construct
RSKYDLK

SEQ ID NO: 17961 - protein, 7 aa, ARTIFICIAL SEQUENCE
  Synthetic Construct
RSKYDNK

SEQ ID NO: 17962 - protein, 7 aa, ARTIFICIAL SEQUENCE
  Synthetic Construct
RSKYDQK

SEQ ID NO: 17963 - protein, 7 aa, ARTIFICIAL SEQUENCE
  Synthetic Construct
RSKYDRK

SEQ ID NO: 17964 - protein, 7 aa, ARTIFICIAL SEQUENCE
  Synthetic Construct
RSKYDSK

SEQ ID NO: 17965 - protein, 7 aa, ARTIFICIAL SEQUENCE
  Synthetic Construct
RSKYDTK

SEQ ID NO: 17966 - protein, 7 aa, ARTIFICIAL SEQUENCE
  Synthetic Construct
RSKYDYK

SEQ ID NO: 17967 - protein, 7 aa, ARTIFICIAL SEQUENCE
  Synthetic Construct
RSKYEAK

SEQ ID NO: 17968 - protein, 7 aa, ARTIFICIAL SEQUENCE
  Synthetic Construct
RSKYEDK

SEQ ID NO: 17969 - protein, 7 aa, ARTIFICIAL SEQUENCE
  Synthetic Construct
RSKYEEK

SEQ ID NO: 17970 - protein, 7 aa, ARTIFICIAL SEQUENCE
  Synthetic Construct
RSKYEFK

SEQ ID NO: 17971 - protein, 7 aa, ARTIFICIAL SEQUENCE
  Synthetic Construct
RSKYEGK

SEQ ID NO: 17972 - protein, 7 aa, ARTIFICIAL SEQUENCE
  Synthetic Construct
RSKYEHK

SEQ ID NO: 17973 - protein, 7 aa, ARTIFICIAL SEQUENCE
  Synthetic Construct
RSKYEIK

SEQ ID NO: 17974 - protein, 7 aa, ARTIFICIAL SEQUENCE
  Synthetic Construct
RSKYELK

SEQ ID NO: 17975 - protein, 7 aa, ARTIFICIAL SEQUENCE
  Synthetic Construct
RSKYENK

SEQ ID NO: 17976 - protein, 7 aa, ARTIFICIAL SEQUENCE
  Synthetic Construct
RSKYEQK

SEQ ID NO: 17977 - protein, 7 aa, ARTIFICIAL SEQUENCE
  Synthetic Construct
RSKYERK

SEQ ID NO: 17978 - protein, 7 aa, ARTIFICIAL SEQUENCE
  Synthetic Construct
RSKYESK

SEQ ID NO: 17979 - protein, 7 aa, ARTIFICIAL SEQUENCE
  Synthetic Construct
RSKYETK

SEQ ID NO: 17980 - protein, 7 aa, ARTIFICIAL SEQUENCE
  Synthetic Construct
RSKYEYK

SEQ ID NO: 17981 - protein, 7 aa, ARTIFICIAL SEQUENCE
  Synthetic Construct
RSKYFAK

SEQ ID NO: 17982 - protein, 7 aa, ARTIFICIAL SEQUENCE
  Synthetic Construct
RSKYFDK

SEQ ID NO: 17983 - protein, 7 aa, ARTIFICIAL SEQUENCE
  Synthetic Construct
RSKYFEK

SEQ ID NO: 17984 - protein, 7 aa, ARTIFICIAL SEQUENCE
  Synthetic Construct
RSKYFFK

SEQ ID NO: 17985 - protein, 7 aa, ARTIFICIAL SEQUENCE
  Synthetic Construct
RSKYFGK

SEQ ID NO: 17986 - protein, 7 aa, ARTIFICIAL SEQUENCE
  Synthetic Construct
RSKYFHK

SEQ ID NO: 17987 - protein, 7 aa, ARTIFICIAL SEQUENCE
  Synthetic Construct
RSKYFIK

SEQ ID NO: 17988 - protein, 7 aa, ARTIFICIAL SEQUENCE
  Synthetic Construct
RSKYFLK

SEQ ID NO: 17989 - protein, 7 aa, ARTIFICIAL SEQUENCE
  Synthetic Construct
RSKYFNK

SEQ ID NO: 17990 - protein, 7 aa, ARTIFICIAL SEQUENCE
  Synthetic Construct
RSKYFQK

SEQ ID NO: 17991 - protein, 7 aa, ARTIFICIAL SEQUENCE
  Synthetic Construct
RSKYFRK

SEQ ID NO: 17992 - protein, 7 aa, ARTIFICIAL SEQUENCE
  Synthetic Construct
RSKYFSK

SEQ ID NO: 17993 - protein, 7 aa, ARTIFICIAL SEQUENCE
  Synthetic Construct
RSKYFTK

SEQ ID NO: 17994 - protein, 7 aa, ARTIFICIAL SEQUENCE
  Synthetic Construct
RSKYFYK

SEQ ID NO: 17995 - protein, 7 aa, ARTIFICIAL SEQUENCE
  Synthetic Construct
RSKYGAK

SEQ ID NO: 17996 - protein, 7 aa, ARTIFICIAL SEQUENCE
  Synthetic Construct
RSKYGDK

SEQ ID NO: 17997 - protein, 7 aa, ARTIFICIAL SEQUENCE
  Synthetic Construct
RSKYGEK

SEQ ID NO: 17998 - protein, 7 aa, ARTIFICIAL SEQUENCE
  Synthetic Construct
RSKYGFK

SEQ ID NO: 17999 - protein, 7 aa, ARTIFICIAL SEQUENCE
  Synthetic Construct
RSKYGGK

SEQ ID NO: 18000 - protein, 7 aa, ARTIFICIAL SEQUENCE
  Synthetic Construct
RSKYGHK

SEQ ID NO: 18001 - protein, 7 aa, ARTIFICIAL SEQUENCE
  Synthetic Construct
RSKYGIK

SEQ ID NO: 18002 - protein, 7 aa, ARTIFICIAL SEQUENCE
  Synthetic Construct
RSKYGLK

SEQ ID NO: 18003 - protein, 7 aa, ARTIFICIAL SEQUENCE
  Synthetic Construct
RSKYGNK

SEQ ID NO: 18004 - protein, 7 aa, ARTIFICIAL SEQUENCE
  Synthetic Construct
RSKYGQK

SEQ ID NO: 18005 - protein, 7 aa, ARTIFICIAL SEQUENCE
  Synthetic Construct
RSKYGRK

SEQ ID NO: 18006 - protein, 7 aa, ARTIFICIAL SEQUENCE
  Synthetic Construct
RSKYGSK

SEQ ID NO: 18007 - protein, 7 aa, ARTIFICIAL SEQUENCE
  Synthetic Construct
RSKYGTK

SEQ ID NO: 18008 - protein, 7 aa, ARTIFICIAL SEQUENCE
  Synthetic Construct
RSKYGYK

SEQ ID NO: 18009 - protein, 7 aa, ARTIFICIAL SEQUENCE
  Synthetic Construct
RSKYHAK

SEQ ID NO: 18010 - protein, 7 aa, ARTIFICIAL SEQUENCE
  Synthetic Construct
RSKYHDK

SEQ ID NO: 18011 - protein, 7 aa, ARTIFICIAL SEQUENCE
  Synthetic Construct
RSKYHEK

SEQ ID NO: 18012 - protein, 7 aa, ARTIFICIAL SEQUENCE
  Synthetic Construct
RSKYHFK

SEQ ID NO: 18013 - protein, 7 aa, ARTIFICIAL SEQUENCE
  Synthetic Construct
RSKYHGK

SEQ ID NO: 18014 - protein, 7 aa, ARTIFICIAL SEQUENCE
  Synthetic Construct
RSKYHHK

SEQ ID NO: 18015 - protein, 7 aa, ARTIFICIAL SEQUENCE
  Synthetic Construct
RSKYHIK

SEQ ID NO: 18016 - protein, 7 aa, ARTIFICIAL SEQUENCE
  Synthetic Construct
RSKYHLK

SEQ ID NO: 18017 - protein, 7 aa, ARTIFICIAL SEQUENCE
  Synthetic Construct
RSKYHNK

SEQ ID NO: 18018 - protein, 7 aa, ARTIFICIAL SEQUENCE
  Synthetic Construct
RSKYHQK

SEQ ID NO: 18019 - protein, 7 aa, ARTIFICIAL SEQUENCE
  Synthetic Construct
RSKYHRK

SEQ ID NO: 18020 - protein, 7 aa, ARTIFICIAL SEQUENCE
  Synthetic Construct
RSKYHSK

SEQ ID NO: 18021 - protein, 7 aa, ARTIFICIAL SEQUENCE
  Synthetic Construct
RSKYHTK

SEQ ID NO: 18022 - protein, 7 aa, ARTIFICIAL SEQUENCE
  Synthetic Construct
RSKYHYK

SEQ ID NO: 18023 - protein, 7 aa, ARTIFICIAL SEQUENCE
  Synthetic Construct
RSKYIAK

SEQ ID NO: 18024 - protein, 7 aa, ARTIFICIAL SEQUENCE
  Synthetic Construct
RSKYIDK

SEQ ID NO: 18025 - protein, 7 aa, ARTIFICIAL SEQUENCE
  Synthetic Construct
RSKYIEK

SEQ ID NO: 18026 - protein, 7 aa, ARTIFICIAL SEQUENCE
  Synthetic Construct
RSKYIFK

SEQ ID NO: 18027 - protein, 7 aa, ARTIFICIAL SEQUENCE
  Synthetic Construct
RSKYIGK

SEQ ID NO: 18028 - protein, 7 aa, ARTIFICIAL SEQUENCE
  Synthetic Construct
RSKYIHK

SEQ ID NO: 18029 - protein, 7 aa, ARTIFICIAL SEQUENCE
  Synthetic Construct
RSKYIIK

SEQ ID NO: 18030 - protein, 7 aa, ARTIFICIAL SEQUENCE
  Synthetic Construct
RSKYILK

SEQ ID NO: 18031 - protein, 7 aa, ARTIFICIAL SEQUENCE
  Synthetic Construct
RSKYINK

SEQ ID NO: 18032 - protein, 7 aa, ARTIFICIAL SEQUENCE
  Synthetic Construct
RSKYIQK

SEQ ID NO: 18033 - protein, 7 aa, ARTIFICIAL SEQUENCE
  Synthetic Construct
RSKYIRK

SEQ ID NO: 18034 - protein, 7 aa, ARTIFICIAL SEQUENCE
  Synthetic Construct
RSKYISK

SEQ ID NO: 18035 - protein, 7 aa, ARTIFICIAL SEQUENCE
  Synthetic Construct
RSKYITK

SEQ ID NO: 18036 - protein, 7 aa, ARTIFICIAL SEQUENCE
  Synthetic Construct
RSKYIYK

SEQ ID NO: 18037 - protein, 7 aa, ARTIFICIAL SEQUENCE
  Synthetic Construct
RSKYLAK

SEQ ID NO: 18038 - protein, 7 aa, ARTIFICIAL SEQUENCE
  Synthetic Construct
RSKYLDK

SEQ ID NO: 18039 - protein, 7 aa, ARTIFICIAL SEQUENCE
  Synthetic Construct
RSKYLEK

SEQ ID NO: 18040 - protein, 7 aa, ARTIFICIAL SEQUENCE
  Synthetic Construct
RSKYLFK

SEQ ID NO: 18041 - protein, 7 aa, ARTIFICIAL SEQUENCE
  Synthetic Construct
RSKYLGK

SEQ ID NO: 18042 - protein, 7 aa, ARTIFICIAL SEQUENCE
  Synthetic Construct
RSKYLHK

SEQ ID NO: 18043 - protein, 7 aa, ARTIFICIAL SEQUENCE
  Synthetic Construct
RSKYLIK

SEQ ID NO: 18044 - protein, 7 aa, ARTIFICIAL SEQUENCE
  Synthetic Construct
RSKYLLK

SEQ ID NO: 18045 - protein, 7 aa, ARTIFICIAL SEQUENCE
  Synthetic Construct
RSKYLNK

SEQ ID NO: 18046 - protein, 7 aa, ARTIFICIAL SEQUENCE
  Synthetic Construct
RSKYLQK

SEQ ID NO: 18047 - protein, 7 aa, ARTIFICIAL SEQUENCE
  Synthetic Construct
RSKYLRK

SEQ ID NO: 18048 - protein, 7 aa, ARTIFICIAL SEQUENCE
  Synthetic Construct
RSKYLSK

SEQ ID NO: 18049 - protein, 7 aa, ARTIFICIAL SEQUENCE
  Synthetic Construct
RSKYLTK

SEQ ID NO: 18050 - protein, 7 aa, ARTIFICIAL SEQUENCE
  Synthetic Construct
RSKYLYK

SEQ ID NO: 18051 - protein, 7 aa, ARTIFICIAL SEQUENCE
  Synthetic Construct
RSKYNAK

SEQ ID NO: 18052 - protein, 7 aa, ARTIFICIAL SEQUENCE
  Synthetic Construct
RSKYNDK

SEQ ID NO: 18053 - protein, 7 aa, ARTIFICIAL SEQUENCE
  Synthetic Construct
RSKYNEK

SEQ ID NO: 18054 - protein, 7 aa, ARTIFICIAL SEQUENCE
  Synthetic Construct
RSKYNFK

SEQ ID NO: 18055 - protein, 7 aa, ARTIFICIAL SEQUENCE
  Synthetic Construct
RSKYNGK

SEQ ID NO: 18056 - protein, 7 aa, ARTIFICIAL SEQUENCE
  Synthetic Construct
RSKYNHK

SEQ ID NO: 18057 - protein, 7 aa, ARTIFICIAL SEQUENCE
  Synthetic Construct
RSKYNIK

SEQ ID NO: 18058 - protein, 7 aa, ARTIFICIAL SEQUENCE
  Synthetic Construct
RSKYNLK

SEQ ID NO: 18059 - protein, 7 aa, ARTIFICIAL SEQUENCE
  Synthetic Construct
RSKYNNK

SEQ ID NO: 18060 - protein, 7 aa, ARTIFICIAL SEQUENCE
  Synthetic Construct
RSKYNQK

SEQ ID NO: 18061 - protein, 7 aa, ARTIFICIAL SEQUENCE
  Synthetic Construct
RSKYNRK

SEQ ID NO: 18062 - protein, 7 aa, ARTIFICIAL SEQUENCE
  Synthetic Construct
RSKYNSK

SEQ ID NO: 18063 - protein, 7 aa, ARTIFICIAL SEQUENCE
  Synthetic Construct
RSKYNTK

SEQ ID NO: 18064 - protein, 7 aa, ARTIFICIAL SEQUENCE
  Synthetic Construct
RSKYNYK

SEQ ID NO: 18065 - protein, 7 aa, ARTIFICIAL SEQUENCE
  Synthetic Construct
RSKYQAK

SEQ ID NO: 18066 - protein, 7 aa, ARTIFICIAL SEQUENCE
  Synthetic Construct
RSKYQDK

SEQ ID NO: 18067 - protein, 7 aa, ARTIFICIAL SEQUENCE
  Synthetic Construct
RSKYQEK

SEQ ID NO: 18068 - protein, 7 aa, ARTIFICIAL SEQUENCE
  Synthetic Construct
RSKYQFK

SEQ ID NO: 18069 - protein, 7 aa, ARTIFICIAL SEQUENCE
  Synthetic Construct
RSKYQGK

SEQ ID NO: 18070 - protein, 7 aa, ARTIFICIAL SEQUENCE
  Synthetic Construct
RSKYQHK

SEQ ID NO: 18071 - protein, 7 aa, ARTIFICIAL SEQUENCE
  Synthetic Construct
RSKYQIK

SEQ ID NO: 18072 - protein, 7 aa, ARTIFICIAL SEQUENCE
  Synthetic Construct
RSKYQLK

SEQ ID NO: 18073 - protein, 7 aa, ARTIFICIAL SEQUENCE
  Synthetic Construct
RSKYQNK

SEQ ID NO: 18074 - protein, 7 aa, ARTIFICIAL SEQUENCE
  Synthetic Construct
RSKYQQK

SEQ ID NO: 18075 - protein, 7 aa, ARTIFICIAL SEQUENCE
  Synthetic Construct
RSKYQRK

SEQ ID NO: 18076 - protein, 7 aa, ARTIFICIAL SEQUENCE
  Synthetic Construct
RSKYQSK

SEQ ID NO: 18077 - protein, 7 aa, ARTIFICIAL SEQUENCE
  Synthetic Construct
RSKYQTK

SEQ ID NO: 18078 - protein, 7 aa, ARTIFICIAL SEQUENCE
  Synthetic Construct
RSKYQYK

SEQ ID NO: 18079 - protein, 7 aa, ARTIFICIAL SEQUENCE
  Synthetic Construct
RSKYRAK

SEQ ID NO: 18080 - protein, 7 aa, ARTIFICIAL SEQUENCE
  Synthetic Construct
RSKYRDK

SEQ ID NO: 18081 - protein, 7 aa, ARTIFICIAL SEQUENCE
  Synthetic Construct
RSKYREK

SEQ ID NO: 18082 - protein, 7 aa, ARTIFICIAL SEQUENCE
  Synthetic Construct
RSKYRFK

SEQ ID NO: 18083 - protein, 7 aa, ARTIFICIAL SEQUENCE
  Synthetic Construct
RSKYRGK

SEQ ID NO: 18084 - protein, 7 aa, ARTIFICIAL SEQUENCE
  Synthetic Construct
RSKYRHK

SEQ ID NO: 18085 - protein, 7 aa, ARTIFICIAL SEQUENCE
  Synthetic Construct
RSKYRIK

SEQ ID NO: 18086 - protein, 7 aa, ARTIFICIAL SEQUENCE
  Synthetic Construct
RSKYRLK

SEQ ID NO: 18087 - protein, 7 aa, ARTIFICIAL SEQUENCE
  Synthetic Construct
RSKYRNK

SEQ ID NO: 18088 - protein, 7 aa, ARTIFICIAL SEQUENCE
  Synthetic Construct
RSKYRQK

SEQ ID NO: 18089 - protein, 7 aa, ARTIFICIAL SEQUENCE
  Synthetic Construct
RSKYRRK

SEQ ID NO: 18090 - protein, 7 aa, ARTIFICIAL SEQUENCE
  Synthetic Construct
RSKYRSK

SEQ ID NO: 18091 - protein, 7 aa, ARTIFICIAL SEQUENCE
  Synthetic Construct
RSKYRTK

SEQ ID NO: 18092 - protein, 7 aa, ARTIFICIAL SEQUENCE
  Synthetic Construct
RSKYRYK

SEQ ID NO: 18093 - protein, 7 aa, ARTIFICIAL SEQUENCE
  Synthetic Construct
RSKYSAK

SEQ ID NO: 18094 - protein, 7 aa, ARTIFICIAL SEQUENCE
  Synthetic Construct
RSKYSDK

SEQ ID NO: 18095 - protein, 7 aa, ARTIFICIAL SEQUENCE
  Synthetic Construct
RSKYSEK

SEQ ID NO: 18096 - protein, 7 aa, ARTIFICIAL SEQUENCE
  Synthetic Construct
RSKYSFK

SEQ ID NO: 18097 - protein, 7 aa, ARTIFICIAL SEQUENCE
  Synthetic Construct
RSKYSGK

SEQ ID NO: 18098 - protein, 7 aa, ARTIFICIAL SEQUENCE
  Synthetic Construct
RSKYSHK

SEQ ID NO: 18099 - protein, 7 aa, ARTIFICIAL SEQUENCE
  Synthetic Construct
RSKYSIK

SEQ ID NO: 18100 - protein, 7 aa, ARTIFICIAL SEQUENCE
  Synthetic Construct
RSKYSLK

SEQ ID NO: 18101 - protein, 7 aa, ARTIFICIAL SEQUENCE
  Synthetic Construct
RSKYSNK

SEQ ID NO: 18102 - protein, 7 aa, ARTIFICIAL SEQUENCE
  Synthetic Construct
RSKYSQK

SEQ ID NO: 18103 - protein, 7 aa, ARTIFICIAL SEQUENCE
  Synthetic Construct
RSKYSRK

SEQ ID NO: 18104 - protein, 7 aa, ARTIFICIAL SEQUENCE
  Synthetic Construct
RSKYSSK

SEQ ID NO: 18105 - protein, 7 aa, ARTIFICIAL SEQUENCE
  Synthetic Construct
RSKYSTK

SEQ ID NO: 18106 - protein, 7 aa, ARTIFICIAL SEQUENCE
  Synthetic Construct
RSKYSYK

SEQ ID NO: 18107 - protein, 7 aa, ARTIFICIAL SEQUENCE
  Synthetic Construct
RSKYTAK

SEQ ID NO: 18108 - protein, 7 aa, ARTIFICIAL SEQUENCE
  Synthetic Construct
RSKYTDK

SEQ ID NO: 18109 - protein, 7 aa, ARTIFICIAL SEQUENCE
  Synthetic Construct
RSKYTEK

SEQ ID NO: 18110 - protein, 7 aa, ARTIFICIAL SEQUENCE
  Synthetic Construct
RSKYTFK

SEQ ID NO: 18111 - protein, 7 aa, ARTIFICIAL SEQUENCE
  Synthetic Construct
RSKYTGK

SEQ ID NO: 18112 - protein, 7 aa, ARTIFICIAL SEQUENCE
  Synthetic Construct
RSKYTHK

SEQ ID NO: 18113 - protein, 7 aa, ARTIFICIAL SEQUENCE
  Synthetic Construct
RSKYTIK

SEQ ID NO: 18114 - protein, 7 aa, ARTIFICIAL SEQUENCE
  Synthetic Construct
RSKYTLK

SEQ ID NO: 18115 - protein, 7 aa, ARTIFICIAL SEQUENCE
  Synthetic Construct
RSKYTNK

SEQ ID NO: 18116 - protein, 7 aa, ARTIFICIAL SEQUENCE
  Synthetic Construct
RSKYTQK

SEQ ID NO: 18117 - protein, 7 aa, ARTIFICIAL SEQUENCE
  Synthetic Construct
RSKYTRK

SEQ ID NO: 18118 - protein, 7 aa, ARTIFICIAL SEQUENCE
  Synthetic Construct
RSKYTSK

SEQ ID NO: 18119 - protein, 7 aa, ARTIFICIAL SEQUENCE
  Synthetic Construct
RSKYTTK

SEQ ID NO: 18120 - protein, 7 aa, ARTIFICIAL SEQUENCE
  Synthetic Construct
RSKYTYK

SEQ ID NO: 18121 - protein, 7 aa, ARTIFICIAL SEQUENCE
  Synthetic Construct
RSKYYAK

SEQ ID NO: 18122 - protein, 7 aa, ARTIFICIAL SEQUENCE
  Synthetic Construct
RSKYYDK

SEQ ID NO: 18123 - protein, 7 aa, ARTIFICIAL SEQUENCE
  Synthetic Construct
RSKYYEK

SEQ ID NO: 18124 - protein, 7 aa, ARTIFICIAL SEQUENCE
  Synthetic Construct
RSKYYFK

SEQ ID NO: 18125 - protein, 7 aa, ARTIFICIAL SEQUENCE
  Synthetic Construct
RSKYYGK

SEQ ID NO: 18126 - protein, 7 aa, ARTIFICIAL SEQUENCE
  Synthetic Construct
RSKYYHK

SEQ ID NO: 18127 - protein, 7 aa, ARTIFICIAL SEQUENCE
  Synthetic Construct
RSKYYIK

SEQ ID NO: 18128 - protein, 7 aa, ARTIFICIAL SEQUENCE
  Synthetic Construct
RSKYYLK

SEQ ID NO: 18129 - protein, 7 aa, ARTIFICIAL SEQUENCE
  Synthetic Construct
RSKYYNK

SEQ ID NO: 18130 - protein, 7 aa, ARTIFICIAL SEQUENCE
  Synthetic Construct
RSKYYQK

SEQ ID NO: 18131 - protein, 7 aa, ARTIFICIAL SEQUENCE
  Synthetic Construct
RSKYYRK

SEQ ID NO: 18132 - protein, 7 aa, ARTIFICIAL SEQUENCE
  Synthetic Construct
RSKYYSK

SEQ ID NO: 18133 - protein, 7 aa, ARTIFICIAL SEQUENCE
  Synthetic Construct
RSKYYTK

SEQ ID NO: 18134 - protein, 7 aa, ARTIFICIAL SEQUENCE
  Synthetic Construct
RSKYYYK

SEQ ID NO: 18135 - protein, 6 aa, ARTIFICIAL SEQUENCE
  Synthetic Construct
TKAAAK

SEQ ID NO: 18136 - protein, 6 aa, ARTIFICIAL SEQUENCE
  Synthetic Construct
TKAADK

SEQ ID NO: 18137 - protein, 6 aa, ARTIFICIAL SEQUENCE
  Synthetic Construct
TKAAEK

SEQ ID NO: 18138 - protein, 6 aa, ARTIFICIAL SEQUENCE
  Synthetic Construct
TKAAFK

SEQ ID NO: 18139 - protein, 6 aa, ARTIFICIAL SEQUENCE
  Synthetic Construct
TKAAGK

SEQ ID NO: 18140 - protein, 6 aa, ARTIFICIAL SEQUENCE
  Synthetic Construct
TKAAHK

SEQ ID NO: 18141 - protein, 6 aa, ARTIFICIAL SEQUENCE
  Synthetic Construct
TKAAIK

SEQ ID NO: 18142 - protein, 6 aa, ARTIFICIAL SEQUENCE
  Synthetic Construct
TKAALK

SEQ ID NO: 18143 - protein, 6 aa, ARTIFICIAL SEQUENCE
  Synthetic Construct
TKAANK

SEQ ID NO: 18144 - protein, 6 aa, ARTIFICIAL SEQUENCE
  Synthetic Construct
TKAAQK

SEQ ID NO: 18145 - protein, 6 aa, ARTIFICIAL SEQUENCE
  Synthetic Construct
TKAARK

SEQ ID NO: 18146 - protein, 6 aa, ARTIFICIAL SEQUENCE
  Synthetic Construct
TKAASK

SEQ ID NO: 18147 - protein, 6 aa, ARTIFICIAL SEQUENCE
  Synthetic Construct
TKAATK

SEQ ID NO: 18148 - protein, 6 aa, ARTIFICIAL SEQUENCE
  Synthetic Construct
TKAAYK

SEQ ID NO: 18149 - protein, 6 aa, ARTIFICIAL SEQUENCE
  Synthetic Construct
TKADAK

SEQ ID NO: 18150 - protein, 6 aa, ARTIFICIAL SEQUENCE
  Synthetic Construct
TKADDK

SEQ ID NO: 18151 - protein, 6 aa, ARTIFICIAL SEQUENCE
  Synthetic Construct
TKADEK

SEQ ID NO: 18152 - protein, 6 aa, ARTIFICIAL SEQUENCE
  Synthetic Construct
TKADFK

SEQ ID NO: 18153 - protein, 6 aa, ARTIFICIAL SEQUENCE
  Synthetic Construct
TKADGK

SEQ ID NO: 18154 - protein, 6 aa, ARTIFICIAL SEQUENCE
  Synthetic Construct
TKADHK

SEQ ID NO: 18155 - protein, 6 aa, ARTIFICIAL SEQUENCE
  Synthetic Construct
TKADIK

SEQ ID NO: 18156 - protein, 6 aa, ARTIFICIAL SEQUENCE
  Synthetic Construct
TKADLK

SEQ ID NO: 18157 - protein, 6 aa, ARTIFICIAL SEQUENCE
  Synthetic Construct
TKADNK

SEQ ID NO: 18158 - protein, 6 aa, ARTIFICIAL SEQUENCE
  Synthetic Construct
TKADQK

SEQ ID NO: 18159 - protein, 6 aa, ARTIFICIAL SEQUENCE
  Synthetic Construct
TKADRK

SEQ ID NO: 18160 - protein, 6 aa, ARTIFICIAL SEQUENCE
  Synthetic Construct
TKADSK

SEQ ID NO: 18161 - protein, 6 aa, ARTIFICIAL SEQUENCE
  Synthetic Construct
TKADTK

SEQ ID NO: 18162 - protein, 6 aa, ARTIFICIAL SEQUENCE
  Synthetic Construct
TKADYK

SEQ ID NO: 18163 - protein, 6 aa, ARTIFICIAL SEQUENCE
  Synthetic Construct
TKAEAK

SEQ ID NO: 18164 - protein, 6 aa, ARTIFICIAL SEQUENCE
  Synthetic Construct
TKAEDK

SEQ ID NO: 18165 - protein, 6 aa, ARTIFICIAL SEQUENCE
  Synthetic Construct
TKAEEK

SEQ ID NO: 18166 - protein, 6 aa, ARTIFICIAL SEQUENCE
  Synthetic Construct
TKAEFK

SEQ ID NO: 18167 - protein, 6 aa, ARTIFICIAL SEQUENCE
  Synthetic Construct
TKAEGK

SEQ ID NO: 18168 - protein, 6 aa, ARTIFICIAL SEQUENCE
  Synthetic Construct
TKAEHK

SEQ ID NO: 18169 - protein, 6 aa, ARTIFICIAL SEQUENCE
  Synthetic Construct
TKAEIK

SEQ ID NO: 18170 - protein, 6 aa, ARTIFICIAL SEQUENCE
  Synthetic Construct
TKAELK

SEQ ID NO: 18171 - protein, 6 aa, ARTIFICIAL SEQUENCE
  Synthetic Construct
TKAENK

SEQ ID NO: 18172 - protein, 6 aa, ARTIFICIAL SEQUENCE
  Synthetic Construct
TKAEQK

SEQ ID NO: 18173 - protein, 6 aa, ARTIFICIAL SEQUENCE
  Synthetic Construct
TKAERK

SEQ ID NO: 18174 - protein, 6 aa, ARTIFICIAL SEQUENCE
  Synthetic Construct
TKAESK

SEQ ID NO: 18175 - protein, 6 aa, ARTIFICIAL SEQUENCE
  Synthetic Construct
TKAETK

SEQ ID NO: 18176 - protein, 6 aa, ARTIFICIAL SEQUENCE
  Synthetic Construct
TKAEYK

SEQ ID NO: 18177 - protein, 6 aa, ARTIFICIAL SEQUENCE
  Synthetic Construct
TKAFAK

SEQ ID NO: 18178 - protein, 6 aa, ARTIFICIAL SEQUENCE
  Synthetic Construct
TKAFDK

SEQ ID NO: 18179 - protein, 6 aa, ARTIFICIAL SEQUENCE
  Synthetic Construct
TKAFEK

SEQ ID NO: 18180 - protein, 6 aa, ARTIFICIAL SEQUENCE
  Synthetic Construct
TKAFFK

SEQ ID NO: 18181 - protein, 6 aa, ARTIFICIAL SEQUENCE
  Synthetic Construct
TKAFGK

SEQ ID NO: 18182 - protein, 6 aa, ARTIFICIAL SEQUENCE
  Synthetic Construct
TKAFHK

SEQ ID NO: 18183 - protein, 6 aa, ARTIFICIAL SEQUENCE
  Synthetic Construct
TKAFIK

SEQ ID NO: 18184 - protein, 6 aa, ARTIFICIAL SEQUENCE
  Synthetic Construct
TKAFLK

SEQ ID NO: 18185 - protein, 6 aa, ARTIFICIAL SEQUENCE
  Synthetic Construct
TKAFNK

SEQ ID NO: 18186 - protein, 6 aa, ARTIFICIAL SEQUENCE
  Synthetic Construct
TKAFQK

SEQ ID NO: 18187 - protein, 6 aa, ARTIFICIAL SEQUENCE
  Synthetic Construct
TKAFRK

SEQ ID NO: 18188 - protein, 6 aa, ARTIFICIAL SEQUENCE
  Synthetic Construct
TKAFSK

SEQ ID NO: 18189 - protein, 6 aa, ARTIFICIAL SEQUENCE
  Synthetic Construct
TKAFTK

SEQ ID NO: 18190 - protein, 6 aa, ARTIFICIAL SEQUENCE
  Synthetic Construct
TKAFYK

SEQ ID NO: 18191 - protein, 6 aa, ARTIFICIAL SEQUENCE
  Synthetic Construct
TKAGAK

SEQ ID NO: 18192 - protein, 6 aa, ARTIFICIAL SEQUENCE
  Synthetic Construct
TKAGDK

SEQ ID NO: 18193 - protein, 6 aa, ARTIFICIAL SEQUENCE
  Synthetic Construct
TKAGEK

SEQ ID NO: 18194 - protein, 6 aa, ARTIFICIAL SEQUENCE
  Synthetic Construct
TKAGFK

SEQ ID NO: 18195 - protein, 6 aa, ARTIFICIAL SEQUENCE
  Synthetic Construct
TKAGGK

SEQ ID NO: 18196 - protein, 6 aa, ARTIFICIAL SEQUENCE
  Synthetic Construct
TKAGHK

SEQ ID NO: 18197 - protein, 6 aa, ARTIFICIAL SEQUENCE
  Synthetic Construct
TKAGIK

SEQ ID NO: 18198 - protein, 6 aa, ARTIFICIAL SEQUENCE
  Synthetic Construct
TKAGLK

SEQ ID NO: 18199 - protein, 6 aa, ARTIFICIAL SEQUENCE
  Synthetic Construct
TKAGNK

SEQ ID NO: 18200 - protein, 6 aa, ARTIFICIAL SEQUENCE
  Synthetic Construct
TKAGQK

SEQ ID NO: 18201 - protein, 6 aa, ARTIFICIAL SEQUENCE
  Synthetic Construct
TKAGRK

SEQ ID NO: 18202 - protein, 6 aa, ARTIFICIAL SEQUENCE
  Synthetic Construct
TKAGSK

SEQ ID NO: 18203 - protein, 6 aa, ARTIFICIAL SEQUENCE
  Synthetic Construct
TKAGTK

SEQ ID NO: 18204 - protein, 6 aa, ARTIFICIAL SEQUENCE
  Synthetic Construct
TKAGYK

SEQ ID NO: 18205 - protein, 6 aa, ARTIFICIAL SEQUENCE
  Synthetic Construct
TKAHAK

SEQ ID NO: 18206 - protein, 6 aa, ARTIFICIAL SEQUENCE
  Synthetic Construct
TKAHDK

SEQ ID NO: 18207 - protein, 6 aa, ARTIFICIAL SEQUENCE
  Synthetic Construct
TKAHEK

SEQ ID NO: 18208 - protein, 6 aa, ARTIFICIAL SEQUENCE
  Synthetic Construct
TKAHFK

SEQ ID NO: 18209 - protein, 6 aa, ARTIFICIAL SEQUENCE
  Synthetic Construct
TKAHGK

SEQ ID NO: 18210 - protein, 6 aa, ARTIFICIAL SEQUENCE
  Synthetic Construct
TKAHHK

SEQ ID NO: 18211 - protein, 6 aa, ARTIFICIAL SEQUENCE
  Synthetic Construct
TKAHIK

SEQ ID NO: 18212 - protein, 6 aa, ARTIFICIAL SEQUENCE
  Synthetic Construct
TKAHLK

SEQ ID NO: 18213 - protein, 6 aa, ARTIFICIAL SEQUENCE
  Synthetic Construct
TKAHNK

SEQ ID NO: 18214 - protein, 6 aa, ARTIFICIAL SEQUENCE
  Synthetic Construct
TKAHQK

SEQ ID NO: 18215 - protein, 6 aa, ARTIFICIAL SEQUENCE
  Synthetic Construct
TKAHRK

SEQ ID NO: 18216 - protein, 6 aa, ARTIFICIAL SEQUENCE
  Synthetic Construct
TKAHSK

SEQ ID NO: 18217 - protein, 6 aa, ARTIFICIAL SEQUENCE
  Synthetic Construct
TKAHTK

SEQ ID NO: 18218 - protein, 6 aa, ARTIFICIAL SEQUENCE
  Synthetic Construct
TKAHYK

SEQ ID NO: 18219 - protein, 6 aa, ARTIFICIAL SEQUENCE
  Synthetic Construct
TKAIAK

SEQ ID NO: 18220 - protein, 6 aa, ARTIFICIAL SEQUENCE
  Synthetic Construct
TKAIDK

SEQ ID NO: 18221 - protein, 6 aa, ARTIFICIAL SEQUENCE
  Synthetic Construct
TKAIEK

SEQ ID NO: 18222 - protein, 6 aa, ARTIFICIAL SEQUENCE
  Synthetic Construct
TKAIFK

SEQ ID NO: 18223 - protein, 6 aa, ARTIFICIAL SEQUENCE
  Synthetic Construct
TKAIGK

SEQ ID NO: 18224 - protein, 6 aa, ARTIFICIAL SEQUENCE
  Synthetic Construct
TKAIHK

SEQ ID NO: 18225 - protein, 6 aa, ARTIFICIAL SEQUENCE
  Synthetic Construct
TKAIIK

SEQ ID NO: 18226 - protein, 6 aa, ARTIFICIAL SEQUENCE
  Synthetic Construct
TKAILK

SEQ ID NO: 18227 - protein, 6 aa, ARTIFICIAL SEQUENCE
  Synthetic Construct
TKAINK

SEQ ID NO: 18228 - protein, 6 aa, ARTIFICIAL SEQUENCE
  Synthetic Construct
TKAIQK

SEQ ID NO: 18229 - protein, 6 aa, ARTIFICIAL SEQUENCE
  Synthetic Construct
TKAIRK

SEQ ID NO: 18230 - protein, 6 aa, ARTIFICIAL SEQUENCE
  Synthetic Construct
TKAISK

SEQ ID NO: 18231 - protein, 6 aa, ARTIFICIAL SEQUENCE
  Synthetic Construct
TKAITK

SEQ ID NO: 18232 - protein, 6 aa, ARTIFICIAL SEQUENCE
  Synthetic Construct
TKAIYK

SEQ ID NO: 18233 - protein, 6 aa, ARTIFICIAL SEQUENCE
  Synthetic Construct
TKALAK

SEQ ID NO: 18234 - protein, 6 aa, ARTIFICIAL SEQUENCE
  Synthetic Construct
TKALDK

SEQ ID NO: 18235 - protein, 6 aa, ARTIFICIAL SEQUENCE
  Synthetic Construct
TKALEK

SEQ ID NO: 18236 - protein, 6 aa, ARTIFICIAL SEQUENCE
  Synthetic Construct
TKALFK

SEQ ID NO: 18237 - protein, 6 aa, ARTIFICIAL SEQUENCE
  Synthetic Construct
TKALGK

SEQ ID NO: 18238 - protein, 6 aa, ARTIFICIAL SEQUENCE
  Synthetic Construct
TKALHK

SEQ ID NO: 18239 - protein, 6 aa, ARTIFICIAL SEQUENCE
  Synthetic Construct
TKALIK

SEQ ID NO: 18240 - protein, 6 aa, ARTIFICIAL SEQUENCE
  Synthetic Construct
TKALLK

SEQ ID NO: 18241 - protein, 6 aa, ARTIFICIAL SEQUENCE
  Synthetic Construct
TKALNK

SEQ ID NO: 18242 - protein, 6 aa, ARTIFICIAL SEQUENCE
  Synthetic Construct
TKALQK

SEQ ID NO: 18243 - protein, 6 aa, ARTIFICIAL SEQUENCE
  Synthetic Construct
TKALRK

SEQ ID NO: 18244 - protein, 6 aa, ARTIFICIAL SEQUENCE
  Synthetic Construct
TKALSK

SEQ ID NO: 18245 - protein, 6 aa, ARTIFICIAL SEQUENCE
  Synthetic Construct
TKALTK

SEQ ID NO: 18246 - protein, 6 aa, ARTIFICIAL SEQUENCE
  Synthetic Construct
TKALYK

SEQ ID NO: 18247 - protein, 6 aa, ARTIFICIAL SEQUENCE
  Synthetic Construct
TKANAK

SEQ ID NO: 18248 - protein, 6 aa, ARTIFICIAL SEQUENCE
  Synthetic Construct
TKANDK

SEQ ID NO: 18249 - protein, 6 aa, ARTIFICIAL SEQUENCE
  Synthetic Construct
TKANEK

SEQ ID NO: 18250 - protein, 6 aa, ARTIFICIAL SEQUENCE
  Synthetic Construct
TKANFK

SEQ ID NO: 18251 - protein, 6 aa, ARTIFICIAL SEQUENCE
  Synthetic Construct
TKANGK

SEQ ID NO: 18252 - protein, 6 aa, ARTIFICIAL SEQUENCE
  Synthetic Construct
TKANHK

SEQ ID NO: 18253 - protein, 6 aa, ARTIFICIAL SEQUENCE
  Synthetic Construct
TKANIK

SEQ ID NO: 18254 - protein, 6 aa, ARTIFICIAL SEQUENCE
  Synthetic Construct
TKANLK

SEQ ID NO: 18255 - protein, 6 aa, ARTIFICIAL SEQUENCE
  Synthetic Construct
TKANNK

SEQ ID NO: 18256 - protein, 6 aa, ARTIFICIAL SEQUENCE
  Synthetic Construct
TKANQK

SEQ ID NO: 18257 - protein, 6 aa, ARTIFICIAL SEQUENCE
  Synthetic Construct
TKANRK

SEQ ID NO: 18258 - protein, 6 aa, ARTIFICIAL SEQUENCE
  Synthetic Construct
TKANSK

SEQ ID NO: 18259 - protein, 6 aa, ARTIFICIAL SEQUENCE
  Synthetic Construct
TKANTK

SEQ ID NO: 18260 - protein, 6 aa, ARTIFICIAL SEQUENCE
  Synthetic Construct
TKANYK

SEQ ID NO: 18261 - protein, 6 aa, ARTIFICIAL SEQUENCE
  Synthetic Construct
TKAQAK

SEQ ID NO: 18262 - protein, 6 aa, ARTIFICIAL SEQUENCE
  Synthetic Construct
TKAQDK

SEQ ID NO: 18263 - protein, 6 aa, ARTIFICIAL SEQUENCE
  Synthetic Construct
TKAQEK

SEQ ID NO: 18264 - protein, 6 aa, ARTIFICIAL SEQUENCE
  Synthetic Construct
TKAQFK

SEQ ID NO: 18265 - protein, 6 aa, ARTIFICIAL SEQUENCE
  Synthetic Construct
TKAQGK

SEQ ID NO: 18266 - protein, 6 aa, ARTIFICIAL SEQUENCE
  Synthetic Construct
TKAQHK

SEQ ID NO: 18267 - protein, 6 aa, ARTIFICIAL SEQUENCE
  Synthetic Construct
TKAQIK

SEQ ID NO: 18268 - protein, 6 aa, ARTIFICIAL SEQUENCE
  Synthetic Construct
TKAQLK

SEQ ID NO: 18269 - protein, 6 aa, ARTIFICIAL SEQUENCE
  Synthetic Construct
TKAQNK

SEQ ID NO: 18270 - protein, 6 aa, ARTIFICIAL SEQUENCE
  Synthetic Construct
TKAQQK

SEQ ID NO: 18271 - protein, 6 aa, ARTIFICIAL SEQUENCE
  Synthetic Construct
TKAQRK

SEQ ID NO: 18272 - protein, 6 aa, ARTIFICIAL SEQUENCE
  Synthetic Construct
TKAQSK

SEQ ID NO: 18273 - protein, 6 aa, ARTIFICIAL SEQUENCE
  Synthetic Construct
TKAQTK

SEQ ID NO: 18274 - protein, 6 aa, ARTIFICIAL SEQUENCE
  Synthetic Construct
TKAQYK

SEQ ID NO: 18275 - protein, 6 aa, ARTIFICIAL SEQUENCE
  Synthetic Construct
TKARAK

SEQ ID NO: 18276 - protein, 6 aa, ARTIFICIAL SEQUENCE
  Synthetic Construct
TKARDK

SEQ ID NO: 18277 - protein, 6 aa, ARTIFICIAL SEQUENCE
  Synthetic Construct
TKAREK

SEQ ID NO: 18278 - protein, 6 aa, ARTIFICIAL SEQUENCE
  Synthetic Construct
TKARFK

SEQ ID NO: 18279 - protein, 6 aa, ARTIFICIAL SEQUENCE
  Synthetic Construct
TKARGK

SEQ ID NO: 18280 - protein, 6 aa, ARTIFICIAL SEQUENCE
  Synthetic Construct
TKARHK

SEQ ID NO: 18281 - protein, 6 aa, ARTIFICIAL SEQUENCE
  Synthetic Construct
TKARIK

SEQ ID NO: 18282 - protein, 6 aa, ARTIFICIAL SEQUENCE
  Synthetic Construct
TKARLK

SEQ ID NO: 18283 - protein, 6 aa, ARTIFICIAL SEQUENCE
  Synthetic Construct
TKARNK

SEQ ID NO: 18284 - protein, 6 aa, ARTIFICIAL SEQUENCE
  Synthetic Construct
TKARQK

SEQ ID NO: 18285 - protein, 6 aa, ARTIFICIAL SEQUENCE
  Synthetic Construct
TKARRK

SEQ ID NO: 18286 - protein, 6 aa, ARTIFICIAL SEQUENCE
  Synthetic Construct
TKARSK

SEQ ID NO: 18287 - protein, 6 aa, ARTIFICIAL SEQUENCE
  Synthetic Construct
TKARTK

SEQ ID NO: 18288 - protein, 6 aa, ARTIFICIAL SEQUENCE
  Synthetic Construct
TKARYK

SEQ ID NO: 18289 - protein, 6 aa, ARTIFICIAL SEQUENCE
  Synthetic Construct
TKASAK

SEQ ID NO: 18290 - protein, 6 aa, ARTIFICIAL SEQUENCE
  Synthetic Construct
TKASDK

SEQ ID NO: 18291 - protein, 6 aa, ARTIFICIAL SEQUENCE
  Synthetic Construct
TKASEK

SEQ ID NO: 18292 - protein, 6 aa, ARTIFICIAL SEQUENCE
  Synthetic Construct
TKASFK

SEQ ID NO: 18293 - protein, 6 aa, ARTIFICIAL SEQUENCE
  Synthetic Construct
TKASGK

SEQ ID NO: 18294 - protein, 6 aa, ARTIFICIAL SEQUENCE
  Synthetic Construct
TKASHK

SEQ ID NO: 18295 - protein, 6 aa, ARTIFICIAL SEQUENCE
  Synthetic Construct
TKASIK

SEQ ID NO: 18296 - protein, 6 aa, ARTIFICIAL SEQUENCE
  Synthetic Construct
TKASLK

SEQ ID NO: 18297 - protein, 6 aa, ARTIFICIAL SEQUENCE
  Synthetic Construct
TKASNK

SEQ ID NO: 18298 - protein, 6 aa, ARTIFICIAL SEQUENCE
  Synthetic Construct
TKASQK

SEQ ID NO: 18299 - protein, 6 aa, ARTIFICIAL SEQUENCE
  Synthetic Construct
TKASRK

SEQ ID NO: 18300 - protein, 6 aa, ARTIFICIAL SEQUENCE
  Synthetic Construct
TKASSK

SEQ ID NO: 18301 - protein, 6 aa, ARTIFICIAL SEQUENCE
  Synthetic Construct
TKASTK

SEQ ID NO: 18302 - protein, 6 aa, ARTIFICIAL SEQUENCE
  Synthetic Construct
TKASYK

SEQ ID NO: 18303 - protein, 6 aa, ARTIFICIAL SEQUENCE
  Synthetic Construct
TKATAK

SEQ ID NO: 18304 - protein, 6 aa, ARTIFICIAL SEQUENCE
  Synthetic Construct
TKATDK

SEQ ID NO: 18305 - protein, 6 aa, ARTIFICIAL SEQUENCE
  Synthetic Construct
TKATEK

SEQ ID NO: 18306 - protein, 6 aa, ARTIFICIAL SEQUENCE
  Synthetic Construct
TKATFK

SEQ ID NO: 18307 - protein, 6 aa, ARTIFICIAL SEQUENCE
  Synthetic Construct
TKATGK

SEQ ID NO: 18308 - protein, 6 aa, ARTIFICIAL SEQUENCE
  Synthetic Construct
TKATHK

SEQ ID NO: 18309 - protein, 6 aa, ARTIFICIAL SEQUENCE
  Synthetic Construct
TKATIK

SEQ ID NO: 18310 - protein, 6 aa, ARTIFICIAL SEQUENCE
  Synthetic Construct
TKATLK

SEQ ID NO: 18311 - protein, 6 aa, ARTIFICIAL SEQUENCE
  Synthetic Construct
TKATNK

SEQ ID NO: 18312 - protein, 6 aa, ARTIFICIAL SEQUENCE
  Synthetic Construct
TKATQK

SEQ ID NO: 18313 - protein, 6 aa, ARTIFICIAL SEQUENCE
  Synthetic Construct
TKATRK

SEQ ID NO: 18314 - protein, 6 aa, ARTIFICIAL SEQUENCE
  Synthetic Construct
TKATSK

SEQ ID NO: 18315 - protein, 6 aa, ARTIFICIAL SEQUENCE
  Synthetic Construct
TKATTK

SEQ ID NO: 18316 - protein, 6 aa, ARTIFICIAL SEQUENCE
  Synthetic Construct
TKATYK

SEQ ID NO: 18317 - protein, 6 aa, ARTIFICIAL SEQUENCE
  Synthetic Construct
TKAYAK

SEQ ID NO: 18318 - protein, 6 aa, ARTIFICIAL SEQUENCE
  Synthetic Construct
TKAYDK

SEQ ID NO: 18319 - protein, 6 aa, ARTIFICIAL SEQUENCE
  Synthetic Construct
TKAYEK

SEQ ID NO: 18320 - protein, 6 aa, ARTIFICIAL SEQUENCE
  Synthetic Construct
TKAYFK

SEQ ID NO: 18321 - protein, 6 aa, ARTIFICIAL SEQUENCE
  Synthetic Construct
TKAYGK

SEQ ID NO: 18322 - protein, 6 aa, ARTIFICIAL SEQUENCE
  Synthetic Construct
TKAYHK

SEQ ID NO: 18323 - protein, 6 aa, ARTIFICIAL SEQUENCE
  Synthetic Construct
TKAYIK

SEQ ID NO: 18324 - protein, 6 aa, ARTIFICIAL SEQUENCE
  Synthetic Construct
TKAYLK

SEQ ID NO: 18325 - protein, 6 aa, ARTIFICIAL SEQUENCE
  Synthetic Construct
TKAYNK

SEQ ID NO: 18326 - protein, 6 aa, ARTIFICIAL SEQUENCE
  Synthetic Construct
TKAYQK

SEQ ID NO: 18327 - protein, 6 aa, ARTIFICIAL SEQUENCE
  Synthetic Construct
TKAYRK

SEQ ID NO: 18328 - protein, 6 aa, ARTIFICIAL SEQUENCE
  Synthetic Construct
TKAYSK

SEQ ID NO: 18329 - protein, 6 aa, ARTIFICIAL SEQUENCE
  Synthetic Construct
TKAYTK

SEQ ID NO: 18330 - protein, 6 aa, ARTIFICIAL SEQUENCE
  Synthetic Construct
TKAYYK

SEQ ID NO: 18331 - protein, 6 aa, ARTIFICIAL SEQUENCE
  Synthetic Construct
TKDAAK

SEQ ID NO: 18332 - protein, 6 aa, ARTIFICIAL SEQUENCE
  Synthetic Construct
TKDADK

SEQ ID NO: 18333 - protein, 6 aa, ARTIFICIAL SEQUENCE
  Synthetic Construct
TKDAEK

SEQ ID NO: 18334 - protein, 6 aa, ARTIFICIAL SEQUENCE
  Synthetic Construct
TKDAFK

SEQ ID NO: 18335 - protein, 6 aa, ARTIFICIAL SEQUENCE
  Synthetic Construct
TKDAGK

SEQ ID NO: 18336 - protein, 6 aa, ARTIFICIAL SEQUENCE
  Synthetic Construct
TKDAHK

SEQ ID NO: 18337 - protein, 6 aa, ARTIFICIAL SEQUENCE
  Synthetic Construct
TKDAIK

SEQ ID NO: 18338 - protein, 6 aa, ARTIFICIAL SEQUENCE
  Synthetic Construct
TKDALK

SEQ ID NO: 18339 - protein, 6 aa, ARTIFICIAL SEQUENCE
  Synthetic Construct
TKDANK

SEQ ID NO: 18340 - protein, 6 aa, ARTIFICIAL SEQUENCE
  Synthetic Construct
TKDAQK

SEQ ID NO: 18341 - protein, 6 aa, ARTIFICIAL SEQUENCE
  Synthetic Construct
TKDARK

SEQ ID NO: 18342 - protein, 6 aa, ARTIFICIAL SEQUENCE
  Synthetic Construct
TKDASK

SEQ ID NO: 18343 - protein, 6 aa, ARTIFICIAL SEQUENCE
  Synthetic Construct
TKDATK

SEQ ID NO: 18344 - protein, 6 aa, ARTIFICIAL SEQUENCE
  Synthetic Construct
TKDAYK

SEQ ID NO: 18345 - protein, 6 aa, ARTIFICIAL SEQUENCE
  Synthetic Construct
TKDDAK

SEQ ID NO: 18346 - protein, 6 aa, ARTIFICIAL SEQUENCE
  Synthetic Construct
TKDDDK

SEQ ID NO: 18347 - protein, 6 aa, ARTIFICIAL SEQUENCE
  Synthetic Construct
TKDDEK

SEQ ID NO: 18348 - protein, 6 aa, ARTIFICIAL SEQUENCE
  Synthetic Construct
TKDDFK

SEQ ID NO: 18349 - protein, 6 aa, ARTIFICIAL SEQUENCE
  Synthetic Construct
TKDDGK

SEQ ID NO: 18350 - protein, 6 aa, ARTIFICIAL SEQUENCE
  Synthetic Construct
TKDDHK

SEQ ID NO: 18351 - protein, 6 aa, ARTIFICIAL SEQUENCE
  Synthetic Construct
TKDDIK

SEQ ID NO: 18352 - protein, 6 aa, ARTIFICIAL SEQUENCE
  Synthetic Construct
TKDDLK

SEQ ID NO: 18353 - protein, 6 aa, ARTIFICIAL SEQUENCE
  Synthetic Construct
TKDDNK

SEQ ID NO: 18354 - protein, 6 aa, ARTIFICIAL SEQUENCE
  Synthetic Construct
TKDDQK

SEQ ID NO: 18355 - protein, 6 aa, ARTIFICIAL SEQUENCE
  Synthetic Construct
TKDDRK

SEQ ID NO: 18356 - protein, 6 aa, ARTIFICIAL SEQUENCE
  Synthetic Construct
TKDDSK

SEQ ID NO: 18357 - protein, 6 aa, ARTIFICIAL SEQUENCE
  Synthetic Construct
TKDDTK

SEQ ID NO: 18358 - protein, 6 aa, ARTIFICIAL SEQUENCE
  Synthetic Construct
TKDDYK

SEQ ID NO: 18359 - protein, 6 aa, ARTIFICIAL SEQUENCE
  Synthetic Construct
TKDEAK

SEQ ID NO: 18360 - protein, 6 aa, ARTIFICIAL SEQUENCE
  Synthetic Construct
TKDEDK

SEQ ID NO: 18361 - protein, 6 aa, ARTIFICIAL SEQUENCE
  Synthetic Construct
TKDEEK

SEQ ID NO: 18362 - protein, 6 aa, ARTIFICIAL SEQUENCE
  Synthetic Construct
TKDEFK

SEQ ID NO: 18363 - protein, 6 aa, ARTIFICIAL SEQUENCE
  Synthetic Construct
TKDEGK

SEQ ID NO: 18364 - protein, 6 aa, ARTIFICIAL SEQUENCE
  Synthetic Construct
TKDEHK

SEQ ID NO: 18365 - protein, 6 aa, ARTIFICIAL SEQUENCE
  Synthetic Construct
TKDEIK

SEQ ID NO: 18366 - protein, 6 aa, ARTIFICIAL SEQUENCE
  Synthetic Construct
TKDELK

SEQ ID NO: 18367 - protein, 6 aa, ARTIFICIAL SEQUENCE
  Synthetic Construct
TKDENK

SEQ ID NO: 18368 - protein, 6 aa, ARTIFICIAL SEQUENCE
  Synthetic Construct
TKDEQK

SEQ ID NO: 18369 - protein, 6 aa, ARTIFICIAL SEQUENCE
  Synthetic Construct
TKDERK

SEQ ID NO: 18370 - protein, 6 aa, ARTIFICIAL SEQUENCE
  Synthetic Construct
TKDESK

SEQ ID NO: 18371 - protein, 6 aa, ARTIFICIAL SEQUENCE
  Synthetic Construct
TKDETK

SEQ ID NO: 18372 - protein, 6 aa, ARTIFICIAL SEQUENCE
  Synthetic Construct
TKDEYK

SEQ ID NO: 18373 - protein, 6 aa, ARTIFICIAL SEQUENCE
  Synthetic Construct
TKDFAK

SEQ ID NO: 18374 - protein, 6 aa, ARTIFICIAL SEQUENCE
  Synthetic Construct
TKDFDK

SEQ ID NO: 18375 - protein, 6 aa, ARTIFICIAL SEQUENCE
  Synthetic Construct
TKDFEK

SEQ ID NO: 18376 - protein, 6 aa, ARTIFICIAL SEQUENCE
  Synthetic Construct
TKDFFK

SEQ ID NO: 18377 - protein, 6 aa, ARTIFICIAL SEQUENCE
  Synthetic Construct
TKDFGK

SEQ ID NO: 18378 - protein, 6 aa, ARTIFICIAL SEQUENCE
  Synthetic Construct
TKDFHK

SEQ ID NO: 18379 - protein, 6 aa, ARTIFICIAL SEQUENCE
  Synthetic Construct
TKDFIK

SEQ ID NO: 18380 - protein, 6 aa, ARTIFICIAL SEQUENCE
  Synthetic Construct
TKDFLK

SEQ ID NO: 18381 - protein, 6 aa, ARTIFICIAL SEQUENCE
  Synthetic Construct
TKDFNK

SEQ ID NO: 18382 - protein, 6 aa, ARTIFICIAL SEQUENCE
  Synthetic Construct
TKDFQK

SEQ ID NO: 18383 - protein, 6 aa, ARTIFICIAL SEQUENCE
  Synthetic Construct
TKDFRK

SEQ ID NO: 18384 - protein, 6 aa, ARTIFICIAL SEQUENCE
  Synthetic Construct
TKDFSK

SEQ ID NO: 18385 - protein, 6 aa, ARTIFICIAL SEQUENCE
  Synthetic Construct
TKDFTK

SEQ ID NO: 18386 - protein, 6 aa, ARTIFICIAL SEQUENCE
  Synthetic Construct
TKDFYK

SEQ ID NO: 18387 - protein, 6 aa, ARTIFICIAL SEQUENCE
  Synthetic Construct
TKDGAK

SEQ ID NO: 18388 - protein, 6 aa, ARTIFICIAL SEQUENCE
  Synthetic Construct
TKDGDK

SEQ ID NO: 18389 - protein, 6 aa, ARTIFICIAL SEQUENCE
  Synthetic Construct
TKDGEK

SEQ ID NO: 18390 - protein, 6 aa, ARTIFICIAL SEQUENCE
  Synthetic Construct
TKDGFK

SEQ ID NO: 18391 - protein, 6 aa, ARTIFICIAL SEQUENCE
  Synthetic Construct
TKDGGK

SEQ ID NO: 18392 - protein, 6 aa, ARTIFICIAL SEQUENCE
  Synthetic Construct
TKDGHK

SEQ ID NO: 18393 - protein, 6 aa, ARTIFICIAL SEQUENCE
  Synthetic Construct
TKDGIK

SEQ ID NO: 18394 - protein, 6 aa, ARTIFICIAL SEQUENCE
  Synthetic Construct
TKDGLK

SEQ ID NO: 18395 - protein, 6 aa, ARTIFICIAL SEQUENCE
  Synthetic Construct
TKDGNK

SEQ ID NO: 18396 - protein, 6 aa, ARTIFICIAL SEQUENCE
  Synthetic Construct
TKDGQK

SEQ ID NO: 18397 - protein, 6 aa, ARTIFICIAL SEQUENCE
  Synthetic Construct
TKDGRK

SEQ ID NO: 18398 - protein, 6 aa, ARTIFICIAL SEQUENCE
  Synthetic Construct
TKDGSK

SEQ ID NO: 18399 - protein, 6 aa, ARTIFICIAL SEQUENCE
  Synthetic Construct
TKDGTK

SEQ ID NO: 18400 - protein, 6 aa, ARTIFICIAL SEQUENCE
  Synthetic Construct
TKDGYK

SEQ ID NO: 18401 - protein, 6 aa, ARTIFICIAL SEQUENCE
  Synthetic Construct
TKDHAK

SEQ ID NO: 18402 - protein, 6 aa, ARTIFICIAL SEQUENCE
  Synthetic Construct
TKDHDK

SEQ ID NO: 18403 - protein, 6 aa, ARTIFICIAL SEQUENCE
  Synthetic Construct
TKDHEK

SEQ ID NO: 18404 - protein, 6 aa, ARTIFICIAL SEQUENCE
  Synthetic Construct
TKDHFK

SEQ ID NO: 18405 - protein, 6 aa, ARTIFICIAL SEQUENCE
  Synthetic Construct
TKDHGK

SEQ ID NO: 18406 - protein, 6 aa, ARTIFICIAL SEQUENCE
  Synthetic Construct
TKDHHK

SEQ ID NO: 18407 - protein, 6 aa, ARTIFICIAL SEQUENCE
  Synthetic Construct
TKDHIK

SEQ ID NO: 18408 - protein, 6 aa, ARTIFICIAL SEQUENCE
  Synthetic Construct
TKDHLK

SEQ ID NO: 18409 - protein, 6 aa, ARTIFICIAL SEQUENCE
  Synthetic Construct
TKDHNK

SEQ ID NO: 18410 - protein, 6 aa, ARTIFICIAL SEQUENCE
  Synthetic Construct
TKDHQK

SEQ ID NO: 18411 - protein, 6 aa, ARTIFICIAL SEQUENCE
  Synthetic Construct
TKDHRK

SEQ ID NO: 18412 - protein, 6 aa, ARTIFICIAL SEQUENCE
  Synthetic Construct
TKDHSK

SEQ ID NO: 18413 - protein, 6 aa, ARTIFICIAL SEQUENCE
  Synthetic Construct
TKDHTK

SEQ ID NO: 18414 - protein, 6 aa, ARTIFICIAL SEQUENCE
  Synthetic Construct
TKDHYK

SEQ ID NO: 18415 - protein, 6 aa, ARTIFICIAL SEQUENCE
  Synthetic Construct
TKDIAK

SEQ ID NO: 18416 - protein, 6 aa, ARTIFICIAL SEQUENCE
  Synthetic Construct
TKDIDK

SEQ ID NO: 18417 - protein, 6 aa, ARTIFICIAL SEQUENCE
  Synthetic Construct
TKDIEK

SEQ ID NO: 18418 - protein, 6 aa, ARTIFICIAL SEQUENCE
  Synthetic Construct
TKDIFK

SEQ ID NO: 18419 - protein, 6 aa, ARTIFICIAL SEQUENCE
  Synthetic Construct
TKDIGK

SEQ ID NO: 18420 - protein, 6 aa, ARTIFICIAL SEQUENCE
  Synthetic Construct
TKDIHK

SEQ ID NO: 18421 - protein, 6 aa, ARTIFICIAL SEQUENCE
  Synthetic Construct
TKDIIK

SEQ ID NO: 18422 - protein, 6 aa, ARTIFICIAL SEQUENCE
  Synthetic Construct
TKDILK

SEQ ID NO: 18423 - protein, 6 aa, ARTIFICIAL SEQUENCE
  Synthetic Construct
TKDINK

SEQ ID NO: 18424 - protein, 6 aa, ARTIFICIAL SEQUENCE
  Synthetic Construct
TKDIQK

SEQ ID NO: 18425 - protein, 6 aa, ARTIFICIAL SEQUENCE
  Synthetic Construct
TKDIRK

SEQ ID NO: 18426 - protein, 6 aa, ARTIFICIAL SEQUENCE
  Synthetic Construct
TKDISK

SEQ ID NO: 18427 - protein, 6 aa, ARTIFICIAL SEQUENCE
  Synthetic Construct
TKDITK

SEQ ID NO: 18428 - protein, 6 aa, ARTIFICIAL SEQUENCE
  Synthetic Construct
TKDIYK

SEQ ID NO: 18429 - protein, 6 aa, ARTIFICIAL SEQUENCE
  Synthetic Construct
TKDLAK

SEQ ID NO: 18430 - protein, 6 aa, ARTIFICIAL SEQUENCE
  Synthetic Construct
TKDLDK

SEQ ID NO: 18431 - protein, 6 aa, ARTIFICIAL SEQUENCE
  Synthetic Construct
TKDLEK

SEQ ID NO: 18432 - protein, 6 aa, ARTIFICIAL SEQUENCE
  Synthetic Construct
TKDLFK

SEQ ID NO: 18433 - protein, 6 aa, ARTIFICIAL SEQUENCE
  Synthetic Construct
TKDLGK

SEQ ID NO: 18434 - protein, 6 aa, ARTIFICIAL SEQUENCE
  Synthetic Construct
TKDLHK

SEQ ID NO: 18435 - protein, 6 aa, ARTIFICIAL SEQUENCE
  Synthetic Construct
TKDLIK

SEQ ID NO: 18436 - protein, 6 aa, ARTIFICIAL SEQUENCE
  Synthetic Construct
TKDLLK

SEQ ID NO: 18437 - protein, 6 aa, ARTIFICIAL SEQUENCE
  Synthetic Construct
TKDLNK

SEQ ID NO: 18438 - protein, 6 aa, ARTIFICIAL SEQUENCE
  Synthetic Construct
TKDLQK

SEQ ID NO: 18439 - protein, 6 aa, ARTIFICIAL SEQUENCE
  Synthetic Construct
TKDLRK

SEQ ID NO: 18440 - protein, 6 aa, ARTIFICIAL SEQUENCE
  Synthetic Construct
TKDLSK

SEQ ID NO: 18441 - protein, 6 aa, ARTIFICIAL SEQUENCE
  Synthetic Construct
TKDLTK

SEQ ID NO: 18442 - protein, 6 aa, ARTIFICIAL SEQUENCE
  Synthetic Construct
TKDLYK

SEQ ID NO: 18443 - protein, 6 aa, ARTIFICIAL SEQUENCE
  Synthetic Construct
TKDNAK

SEQ ID NO: 18444 - protein, 6 aa, ARTIFICIAL SEQUENCE
  Synthetic Construct
TKDNDK

SEQ ID NO: 18445 - protein, 6 aa, ARTIFICIAL SEQUENCE
  Synthetic Construct
TKDNEK

SEQ ID NO: 18446 - protein, 6 aa, ARTIFICIAL SEQUENCE
  Synthetic Construct
TKDNFK

SEQ ID NO: 18447 - protein, 6 aa, ARTIFICIAL SEQUENCE
  Synthetic Construct
TKDNGK

SEQ ID NO: 18448 - protein, 6 aa, ARTIFICIAL SEQUENCE
  Synthetic Construct
TKDNHK

SEQ ID NO: 18449 - protein, 6 aa, ARTIFICIAL SEQUENCE
  Synthetic Construct
TKDNIK

SEQ ID NO: 18450 - protein, 6 aa, ARTIFICIAL SEQUENCE
  Synthetic Construct
TKDNLK

SEQ ID NO: 18451 - protein, 6 aa, ARTIFICIAL SEQUENCE
  Synthetic Construct
TKDNNK

SEQ ID NO: 18452 - protein, 6 aa, ARTIFICIAL SEQUENCE
  Synthetic Construct
TKDNQK

SEQ ID NO: 18453 - protein, 6 aa, ARTIFICIAL SEQUENCE
  Synthetic Construct
TKDNRK

SEQ ID NO: 18454 - protein, 6 aa, ARTIFICIAL SEQUENCE
  Synthetic Construct
TKDNSK

SEQ ID NO: 18455 - protein, 6 aa, ARTIFICIAL SEQUENCE
  Synthetic Construct
TKDNTK

SEQ ID NO: 18456 - protein, 6 aa, ARTIFICIAL SEQUENCE
  Synthetic Construct
TKDNYK

SEQ ID NO: 18457 - protein, 6 aa, ARTIFICIAL SEQUENCE
  Synthetic Construct
TKDQAK

SEQ ID NO: 18458 - protein, 6 aa, ARTIFICIAL SEQUENCE
  Synthetic Construct
TKDQDK

SEQ ID NO: 18459 - protein, 6 aa, ARTIFICIAL SEQUENCE
  Synthetic Construct
TKDQEK

SEQ ID NO: 18460 - protein, 6 aa, ARTIFICIAL SEQUENCE
  Synthetic Construct
TKDQFK

SEQ ID NO: 18461 - protein, 6 aa, ARTIFICIAL SEQUENCE
  Synthetic Construct
TKDQGK

SEQ ID NO: 18462 - protein, 6 aa, ARTIFICIAL SEQUENCE
  Synthetic Construct
TKDQHK

SEQ ID NO: 18463 - protein, 6 aa, ARTIFICIAL SEQUENCE
  Synthetic Construct
TKDQIK

SEQ ID NO: 18464 - protein, 6 aa, ARTIFICIAL SEQUENCE
  Synthetic Construct
TKDQLK

SEQ ID NO: 18465 - protein, 6 aa, ARTIFICIAL SEQUENCE
  Synthetic Construct
TKDQNK

SEQ ID NO: 18466 - protein, 6 aa, ARTIFICIAL SEQUENCE
  Synthetic Construct
TKDQQK

SEQ ID NO: 18467 - protein, 6 aa, ARTIFICIAL SEQUENCE
  Synthetic Construct
TKDQRK

SEQ ID NO: 18468 - protein, 6 aa, ARTIFICIAL SEQUENCE
  Synthetic Construct
TKDQSK

SEQ ID NO: 18469 - protein, 6 aa, ARTIFICIAL SEQUENCE
  Synthetic Construct
TKDQTK

SEQ ID NO: 18470 - protein, 6 aa, ARTIFICIAL SEQUENCE
  Synthetic Construct
TKDQYK

SEQ ID NO: 18471 - protein, 6 aa, ARTIFICIAL SEQUENCE
  Synthetic Construct
TKDRAK

SEQ ID NO: 18472 - protein, 6 aa, ARTIFICIAL SEQUENCE
  Synthetic Construct
TKDRDK

SEQ ID NO: 18473 - protein, 6 aa, ARTIFICIAL SEQUENCE
  Synthetic Construct
TKDREK

SEQ ID NO: 18474 - protein, 6 aa, ARTIFICIAL SEQUENCE
  Synthetic Construct
TKDRFK

SEQ ID NO: 18475 - protein, 6 aa, ARTIFICIAL SEQUENCE
  Synthetic Construct
TKDRGK

SEQ ID NO: 18476 - protein, 6 aa, ARTIFICIAL SEQUENCE
  Synthetic Construct
TKDRHK

SEQ ID NO: 18477 - protein, 6 aa, ARTIFICIAL SEQUENCE
  Synthetic Construct
TKDRIK

SEQ ID NO: 18478 - protein, 6 aa, ARTIFICIAL SEQUENCE
  Synthetic Construct
TKDRLK

SEQ ID NO: 18479 - protein, 6 aa, ARTIFICIAL SEQUENCE
  Synthetic Construct
TKDRNK

SEQ ID NO: 18480 - protein, 6 aa, ARTIFICIAL SEQUENCE
  Synthetic Construct
TKDRQK

SEQ ID NO: 18481 - protein, 6 aa, ARTIFICIAL SEQUENCE
  Synthetic Construct
TKDRRK

SEQ ID NO: 18482 - protein, 6 aa, ARTIFICIAL SEQUENCE
  Synthetic Construct
TKDRSK

SEQ ID NO: 18483 - protein, 6 aa, ARTIFICIAL SEQUENCE
  Synthetic Construct
TKDRTK

SEQ ID NO: 18484 - protein, 6 aa, ARTIFICIAL SEQUENCE
  Synthetic Construct
TKDRYK

SEQ ID NO: 18485 - protein, 6 aa, ARTIFICIAL SEQUENCE
  Synthetic Construct
TKDSAK

SEQ ID NO: 18486 - protein, 6 aa, ARTIFICIAL SEQUENCE
  Synthetic Construct
TKDSDK

SEQ ID NO: 18487 - protein, 6 aa, ARTIFICIAL SEQUENCE
  Synthetic Construct
TKDSEK

SEQ ID NO: 18488 - protein, 6 aa, ARTIFICIAL SEQUENCE
  Synthetic Construct
TKDSFK

SEQ ID NO: 18489 - protein, 6 aa, ARTIFICIAL SEQUENCE
  Synthetic Construct
TKDSGK

SEQ ID NO: 18490 - protein, 6 aa, ARTIFICIAL SEQUENCE
  Synthetic Construct
TKDSHK

SEQ ID NO: 18491 - protein, 6 aa, ARTIFICIAL SEQUENCE
  Synthetic Construct
TKDSIK

SEQ ID NO: 18492 - protein, 6 aa, ARTIFICIAL SEQUENCE
  Synthetic Construct
TKDSLK

SEQ ID NO: 18493 - protein, 6 aa, ARTIFICIAL SEQUENCE
  Synthetic Construct
TKDSNK

SEQ ID NO: 18494 - protein, 6 aa, ARTIFICIAL SEQUENCE
  Synthetic Construct
TKDSQK

SEQ ID NO: 18495 - protein, 6 aa, ARTIFICIAL SEQUENCE
  Synthetic Construct
TKDSRK

SEQ ID NO: 18496 - protein, 6 aa, ARTIFICIAL SEQUENCE
  Synthetic Construct
TKDSSK

SEQ ID NO: 18497 - protein, 6 aa, ARTIFICIAL SEQUENCE
  Synthetic Construct
TKDSTK

SEQ ID NO: 18498 - protein, 6 aa, ARTIFICIAL SEQUENCE
  Synthetic Construct
TKDSYK

SEQ ID NO: 18499 - protein, 6 aa, ARTIFICIAL SEQUENCE
  Synthetic Construct
TKDTAK

SEQ ID NO: 18500 - protein, 6 aa, ARTIFICIAL SEQUENCE
  Synthetic Construct
TKDTDK

SEQ ID NO: 18501 - protein, 6 aa, ARTIFICIAL SEQUENCE
  Synthetic Construct
TKDTEK

SEQ ID NO: 18502 - protein, 6 aa, ARTIFICIAL SEQUENCE
  Synthetic Construct
TKDTFK

SEQ ID NO: 18503 - protein, 6 aa, ARTIFICIAL SEQUENCE
  Synthetic Construct
TKDTGK

SEQ ID NO: 18504 - protein, 6 aa, ARTIFICIAL SEQUENCE
  Synthetic Construct
TKDTHK

SEQ ID NO: 18505 - protein, 6 aa, ARTIFICIAL SEQUENCE
  Synthetic Construct
TKDTIK

SEQ ID NO: 18506 - protein, 6 aa, ARTIFICIAL SEQUENCE
  Synthetic Construct
TKDTLK

SEQ ID NO: 18507 - protein, 6 aa, ARTIFICIAL SEQUENCE
  Synthetic Construct
TKDTNK

SEQ ID NO: 18508 - protein, 6 aa, ARTIFICIAL SEQUENCE
  Synthetic Construct
TKDTQK

SEQ ID NO: 18509 - protein, 6 aa, ARTIFICIAL SEQUENCE
  Synthetic Construct
TKDTRK

SEQ ID NO: 18510 - protein, 6 aa, ARTIFICIAL SEQUENCE
  Synthetic Construct
TKDTSK

SEQ ID NO: 18511 - protein, 6 aa, ARTIFICIAL SEQUENCE
  Synthetic Construct
TKDTTK

SEQ ID NO: 18512 - protein, 6 aa, ARTIFICIAL SEQUENCE
  Synthetic Construct
TKDTYK

SEQ ID NO: 18513 - protein, 6 aa, ARTIFICIAL SEQUENCE
  Synthetic Construct
TKDYAK

SEQ ID NO: 18514 - protein, 6 aa, ARTIFICIAL SEQUENCE
  Synthetic Construct
TKDYDK

SEQ ID NO: 18515 - protein, 6 aa, ARTIFICIAL SEQUENCE
  Synthetic Construct
TKDYEK

SEQ ID NO: 18516 - protein, 6 aa, ARTIFICIAL SEQUENCE
  Synthetic Construct
TKDYFK

SEQ ID NO: 18517 - protein, 6 aa, ARTIFICIAL SEQUENCE
  Synthetic Construct
TKDYGK

SEQ ID NO: 18518 - protein, 6 aa, ARTIFICIAL SEQUENCE
  Synthetic Construct
TKDYHK

SEQ ID NO: 18519 - protein, 6 aa, ARTIFICIAL SEQUENCE
  Synthetic Construct
TKDYIK

SEQ ID NO: 18520 - protein, 6 aa, ARTIFICIAL SEQUENCE
  Synthetic Construct
TKDYLK

SEQ ID NO: 18521 - protein, 6 aa, ARTIFICIAL SEQUENCE
  Synthetic Construct
TKDYNK

SEQ ID NO: 18522 - protein, 6 aa, ARTIFICIAL SEQUENCE
  Synthetic Construct
TKDYQK

SEQ ID NO: 18523 - protein, 6 aa, ARTIFICIAL SEQUENCE
  Synthetic Construct
TKDYRK

SEQ ID NO: 18524 - protein, 6 aa, ARTIFICIAL SEQUENCE
  Synthetic Construct
TKDYSK

SEQ ID NO: 18525 - protein, 6 aa, ARTIFICIAL SEQUENCE
  Synthetic Construct
TKDYTK

SEQ ID NO: 18526 - protein, 6 aa, ARTIFICIAL SEQUENCE
  Synthetic Construct
TKDYYK

SEQ ID NO: 18527 - protein, 6 aa, ARTIFICIAL SEQUENCE
  Synthetic Construct
TKEAAK

SEQ ID NO: 18528 - protein, 6 aa, ARTIFICIAL SEQUENCE
  Synthetic Construct
TKEADK

SEQ ID NO: 18529 - protein, 6 aa, ARTIFICIAL SEQUENCE
  Synthetic Construct
TKEAEK

SEQ ID NO: 18530 - protein, 6 aa, ARTIFICIAL SEQUENCE
  Synthetic Construct
TKEAFK

SEQ ID NO: 18531 - protein, 6 aa, ARTIFICIAL SEQUENCE
  Synthetic Construct
TKEAGK

SEQ ID NO: 18532 - protein, 6 aa, ARTIFICIAL SEQUENCE
  Synthetic Construct
TKEAHK

SEQ ID NO: 18533 - protein, 6 aa, ARTIFICIAL SEQUENCE
  Synthetic Construct
TKEAIK

SEQ ID NO: 18534 - protein, 6 aa, ARTIFICIAL SEQUENCE
  Synthetic Construct
TKEALK

SEQ ID NO: 18535 - protein, 6 aa, ARTIFICIAL SEQUENCE
  Synthetic Construct
TKEANK

SEQ ID NO: 18536 - protein, 6 aa, ARTIFICIAL SEQUENCE
  Synthetic Construct
TKEAQK

SEQ ID NO: 18537 - protein, 6 aa, ARTIFICIAL SEQUENCE
  Synthetic Construct
TKEARK

SEQ ID NO: 18538 - protein, 6 aa, ARTIFICIAL SEQUENCE
  Synthetic Construct
TKEASK

SEQ ID NO: 18539 - protein, 6 aa, ARTIFICIAL SEQUENCE
  Synthetic Construct
TKEATK

SEQ ID NO: 18540 - protein, 6 aa, ARTIFICIAL SEQUENCE
  Synthetic Construct
TKEAYK

SEQ ID NO: 18541 - protein, 6 aa, ARTIFICIAL SEQUENCE
  Synthetic Construct
TKEDAK

SEQ ID NO: 18542 - protein, 6 aa, ARTIFICIAL SEQUENCE
  Synthetic Construct
TKEDDK

SEQ ID NO: 18543 - protein, 6 aa, ARTIFICIAL SEQUENCE
  Synthetic Construct
TKEDEK

SEQ ID NO: 18544 - protein, 6 aa, ARTIFICIAL SEQUENCE
  Synthetic Construct
TKEDFK

SEQ ID NO: 18545 - protein, 6 aa, ARTIFICIAL SEQUENCE
  Synthetic Construct
TKEDGK

SEQ ID NO: 18546 - protein, 6 aa, ARTIFICIAL SEQUENCE
  Synthetic Construct
TKEDHK

SEQ ID NO: 18547 - protein, 6 aa, ARTIFICIAL SEQUENCE
  Synthetic Construct
TKEDIK

SEQ ID NO: 18548 - protein, 6 aa, ARTIFICIAL SEQUENCE
  Synthetic Construct
TKEDLK

SEQ ID NO: 18549 - protein, 6 aa, ARTIFICIAL SEQUENCE
  Synthetic Construct
TKEDNK

SEQ ID NO: 18550 - protein, 6 aa, ARTIFICIAL SEQUENCE
  Synthetic Construct
TKEDQK

SEQ ID NO: 18551 - protein, 6 aa, ARTIFICIAL SEQUENCE
  Synthetic Construct
TKEDRK

SEQ ID NO: 18552 - protein, 6 aa, ARTIFICIAL SEQUENCE
  Synthetic Construct
TKEDSK

SEQ ID NO: 18553 - protein, 6 aa, ARTIFICIAL SEQUENCE
  Synthetic Construct
TKEDTK

SEQ ID NO: 18554 - protein, 6 aa, ARTIFICIAL SEQUENCE
  Synthetic Construct
TKEDYK

SEQ ID NO: 18555 - protein, 6 aa, ARTIFICIAL SEQUENCE
  Synthetic Construct
TKEEAK

SEQ ID NO: 18556 - protein, 6 aa, ARTIFICIAL SEQUENCE
  Synthetic Construct
TKEEDK

SEQ ID NO: 18557 - protein, 6 aa, ARTIFICIAL SEQUENCE
  Synthetic Construct
TKEEEK

SEQ ID NO: 18558 - protein, 6 aa, ARTIFICIAL SEQUENCE
  Synthetic Construct
TKEEFK

SEQ ID NO: 18559 - protein, 6 aa, ARTIFICIAL SEQUENCE
  Synthetic Construct
TKEEGK

SEQ ID NO: 18560 - protein, 6 aa, ARTIFICIAL SEQUENCE
  Synthetic Construct
TKEEHK

SEQ ID NO: 18561 - protein, 6 aa, ARTIFICIAL SEQUENCE
  Synthetic Construct
TKEEIK

SEQ ID NO: 18562 - protein, 6 aa, ARTIFICIAL SEQUENCE
  Synthetic Construct
TKEELK

SEQ ID NO: 18563 - protein, 6 aa, ARTIFICIAL SEQUENCE
  Synthetic Construct
TKEENK

SEQ ID NO: 18564 - protein, 6 aa, ARTIFICIAL SEQUENCE
  Synthetic Construct
TKEEQK

SEQ ID NO: 18565 - protein, 6 aa, ARTIFICIAL SEQUENCE
  Synthetic Construct
TKEERK

SEQ ID NO: 18566 - protein, 6 aa, ARTIFICIAL SEQUENCE
  Synthetic Construct
TKEESK

SEQ ID NO: 18567 - protein, 6 aa, ARTIFICIAL SEQUENCE
  Synthetic Construct
TKEETK

SEQ ID NO: 18568 - protein, 6 aa, ARTIFICIAL SEQUENCE
  Synthetic Construct
TKEEYK

SEQ ID NO: 18569 - protein, 6 aa, ARTIFICIAL SEQUENCE
  Synthetic Construct
TKEFAK

SEQ ID NO: 18570 - protein, 6 aa, ARTIFICIAL SEQUENCE
  Synthetic Construct
TKEFDK

SEQ ID NO: 18571 - protein, 6 aa, ARTIFICIAL SEQUENCE
  Synthetic Construct
TKEFEK

SEQ ID NO: 18572 - protein, 6 aa, ARTIFICIAL SEQUENCE
  Synthetic Construct
TKEFFK

SEQ ID NO: 18573 - protein, 6 aa, ARTIFICIAL SEQUENCE
  Synthetic Construct
TKEFGK

SEQ ID NO: 18574 - protein, 6 aa, ARTIFICIAL SEQUENCE
  Synthetic Construct
TKEFHK

SEQ ID NO: 18575 - protein, 6 aa, ARTIFICIAL SEQUENCE
  Synthetic Construct
TKEFIK

SEQ ID NO: 18576 - protein, 6 aa, ARTIFICIAL SEQUENCE
  Synthetic Construct
TKEFLK

SEQ ID NO: 18577 - protein, 6 aa, ARTIFICIAL SEQUENCE
  Synthetic Construct
TKEFNK

SEQ ID NO: 18578 - protein, 6 aa, ARTIFICIAL SEQUENCE
  Synthetic Construct
TKEFQK

SEQ ID NO: 18579 - protein, 6 aa, ARTIFICIAL SEQUENCE
  Synthetic Construct
TKEFRK

SEQ ID NO: 18580 - protein, 6 aa, ARTIFICIAL SEQUENCE
  Synthetic Construct
TKEFSK

SEQ ID NO: 18581 - protein, 6 aa, ARTIFICIAL SEQUENCE
  Synthetic Construct
TKEFTK

SEQ ID NO: 18582 - protein, 6 aa, ARTIFICIAL SEQUENCE
  Synthetic Construct
TKEFYK

SEQ ID NO: 18583 - protein, 6 aa, ARTIFICIAL SEQUENCE
  Synthetic Construct
TKEGAK

SEQ ID NO: 18584 - protein, 6 aa, ARTIFICIAL SEQUENCE
  Synthetic Construct
TKEGDK

SEQ ID NO: 18585 - protein, 6 aa, ARTIFICIAL SEQUENCE
  Synthetic Construct
TKEGEK

SEQ ID NO: 18586 - protein, 6 aa, ARTIFICIAL SEQUENCE
  Synthetic Construct
TKEGFK

SEQ ID NO: 18587 - protein, 6 aa, ARTIFICIAL SEQUENCE
  Synthetic Construct
TKEGGK

SEQ ID NO: 18588 - protein, 6 aa, ARTIFICIAL SEQUENCE
  Synthetic Construct
TKEGHK

SEQ ID NO: 18589 - protein, 6 aa, ARTIFICIAL SEQUENCE
  Synthetic Construct
TKEGIK

SEQ ID NO: 18590 - protein, 6 aa, ARTIFICIAL SEQUENCE
  Synthetic Construct
TKEGLK

SEQ ID NO: 18591 - protein, 6 aa, ARTIFICIAL SEQUENCE
  Synthetic Construct
TKEGNK

SEQ ID NO: 18592 - protein, 6 aa, ARTIFICIAL SEQUENCE
  Synthetic Construct
TKEGQK

SEQ ID NO: 18593 - protein, 6 aa, ARTIFICIAL SEQUENCE
  Synthetic Construct
TKEGRK

SEQ ID NO: 18594 - protein, 6 aa, ARTIFICIAL SEQUENCE
  Synthetic Construct
TKEGSK

SEQ ID NO: 18595 - protein, 6 aa, ARTIFICIAL SEQUENCE
  Synthetic Construct
TKEGTK

SEQ ID NO: 18596 - protein, 6 aa, ARTIFICIAL SEQUENCE
  Synthetic Construct
TKEGYK

SEQ ID NO: 18597 - protein, 6 aa, ARTIFICIAL SEQUENCE
  Synthetic Construct
TKEHAK

SEQ ID NO: 18598 - protein, 6 aa, ARTIFICIAL SEQUENCE
  Synthetic Construct
TKEHDK

SEQ ID NO: 18599 - protein, 6 aa, ARTIFICIAL SEQUENCE
  Synthetic Construct
TKEHEK

SEQ ID NO: 18600 - protein, 6 aa, ARTIFICIAL SEQUENCE
  Synthetic Construct
TKEHFK

SEQ ID NO: 18601 - protein, 6 aa, ARTIFICIAL SEQUENCE
  Synthetic Construct
TKEHGK

SEQ ID NO: 18602 - protein, 6 aa, ARTIFICIAL SEQUENCE
  Synthetic Construct
TKEHHK

SEQ ID NO: 18603 - protein, 6 aa, ARTIFICIAL SEQUENCE
  Synthetic Construct
TKEHIK

SEQ ID NO: 18604 - protein, 6 aa, ARTIFICIAL SEQUENCE
  Synthetic Construct
TKEHLK

SEQ ID NO: 18605 - protein, 6 aa, ARTIFICIAL SEQUENCE
  Synthetic Construct
TKEHNK

SEQ ID NO: 18606 - protein, 6 aa, ARTIFICIAL SEQUENCE
  Synthetic Construct
TKEHQK

SEQ ID NO: 18607 - protein, 6 aa, ARTIFICIAL SEQUENCE
  Synthetic Construct
TKEHRK

SEQ ID NO: 18608 - protein, 6 aa, ARTIFICIAL SEQUENCE
  Synthetic Construct
TKEHSK

SEQ ID NO: 18609 - protein, 6 aa, ARTIFICIAL SEQUENCE
  Synthetic Construct
TKEHTK

SEQ ID NO: 18610 - protein, 6 aa, ARTIFICIAL SEQUENCE
  Synthetic Construct
TKEHYK

SEQ ID NO: 18611 - protein, 6 aa, ARTIFICIAL SEQUENCE
  Synthetic Construct
TKEIAK

SEQ ID NO: 18612 - protein, 6 aa, ARTIFICIAL SEQUENCE
  Synthetic Construct
TKEIDK

SEQ ID NO: 18613 - protein, 6 aa, ARTIFICIAL SEQUENCE
  Synthetic Construct
TKEIEK

SEQ ID NO: 18614 - protein, 6 aa, ARTIFICIAL SEQUENCE
  Synthetic Construct
TKEIFK

SEQ ID NO: 18615 - protein, 6 aa, ARTIFICIAL SEQUENCE
  Synthetic Construct
TKEIGK

SEQ ID NO: 18616 - protein, 6 aa, ARTIFICIAL SEQUENCE
  Synthetic Construct
TKEIHK

SEQ ID NO: 18617 - protein, 6 aa, ARTIFICIAL SEQUENCE
  Synthetic Construct
TKEIIK

SEQ ID NO: 18618 - protein, 6 aa, ARTIFICIAL SEQUENCE
  Synthetic Construct
TKEILK

SEQ ID NO: 18619 - protein, 6 aa, ARTIFICIAL SEQUENCE
  Synthetic Construct
TKEINK

SEQ ID NO: 18620 - protein, 6 aa, ARTIFICIAL SEQUENCE
  Synthetic Construct
TKEIQK

SEQ ID NO: 18621 - protein, 6 aa, ARTIFICIAL SEQUENCE
  Synthetic Construct
TKEIRK

SEQ ID NO: 18622 - protein, 6 aa, ARTIFICIAL SEQUENCE
  Synthetic Construct
TKEISK

SEQ ID NO: 18623 - protein, 6 aa, ARTIFICIAL SEQUENCE
  Synthetic Construct
TKEITK

SEQ ID NO: 18624 - protein, 6 aa, ARTIFICIAL SEQUENCE
  Synthetic Construct
TKEIYK

SEQ ID NO: 18625 - protein, 6 aa, ARTIFICIAL SEQUENCE
  Synthetic Construct
TKELAK

SEQ ID NO: 18626 - protein, 6 aa, ARTIFICIAL SEQUENCE
  Synthetic Construct
TKELDK

SEQ ID NO: 18627 - protein, 6 aa, ARTIFICIAL SEQUENCE
  Synthetic Construct
TKELEK

SEQ ID NO: 18628 - protein, 6 aa, ARTIFICIAL SEQUENCE
  Synthetic Construct
TKELFK

SEQ ID NO: 18629 - protein, 6 aa, ARTIFICIAL SEQUENCE
  Synthetic Construct
TKELGK

SEQ ID NO: 18630 - protein, 6 aa, ARTIFICIAL SEQUENCE
  Synthetic Construct
TKELHK

SEQ ID NO: 18631 - protein, 6 aa, ARTIFICIAL SEQUENCE
  Synthetic Construct
TKELIK

SEQ ID NO: 18632 - protein, 6 aa, ARTIFICIAL SEQUENCE
  Synthetic Construct
TKELLK

SEQ ID NO: 18633 - protein, 6 aa, ARTIFICIAL SEQUENCE
  Synthetic Construct
TKELNK

SEQ ID NO: 18634 - protein, 6 aa, ARTIFICIAL SEQUENCE
  Synthetic Construct
TKELQK

SEQ ID NO: 18635 - protein, 6 aa, ARTIFICIAL SEQUENCE
  Synthetic Construct
TKELRK

SEQ ID NO: 18636 - protein, 6 aa, ARTIFICIAL SEQUENCE
  Synthetic Construct
TKELSK

SEQ ID NO: 18637 - protein, 6 aa, ARTIFICIAL SEQUENCE
  Synthetic Construct
TKELTK

SEQ ID NO: 18638 - protein, 6 aa, ARTIFICIAL SEQUENCE
  Synthetic Construct
TKELYK

SEQ ID NO: 18639 - protein, 6 aa, ARTIFICIAL SEQUENCE
  Synthetic Construct
TKENAK

SEQ ID NO: 18640 - protein, 6 aa, ARTIFICIAL SEQUENCE
  Synthetic Construct
TKENDK

SEQ ID NO: 18641 - protein, 6 aa, ARTIFICIAL SEQUENCE
  Synthetic Construct
TKENEK

SEQ ID NO: 18642 - protein, 6 aa, ARTIFICIAL SEQUENCE
  Synthetic Construct
TKENFK

SEQ ID NO: 18643 - protein, 6 aa, ARTIFICIAL SEQUENCE
  Synthetic Construct
TKENGK

SEQ ID NO: 18644 - protein, 6 aa, ARTIFICIAL SEQUENCE
  Synthetic Construct
TKENHK

SEQ ID NO: 18645 - protein, 6 aa, ARTIFICIAL SEQUENCE
  Synthetic Construct
TKENIK

SEQ ID NO: 18646 - protein, 6 aa, ARTIFICIAL SEQUENCE
  Synthetic Construct
TKENLK

SEQ ID NO: 18647 - protein, 6 aa, ARTIFICIAL SEQUENCE
  Synthetic Construct
TKENNK

SEQ ID NO: 18648 - protein, 6 aa, ARTIFICIAL SEQUENCE
  Synthetic Construct
TKENQK

SEQ ID NO: 18649 - protein, 6 aa, ARTIFICIAL SEQUENCE
  Synthetic Construct
TKENRK

SEQ ID NO: 18650 - protein, 6 aa, ARTIFICIAL SEQUENCE
  Synthetic Construct
TKENSK

SEQ ID NO: 18651 - protein, 6 aa, ARTIFICIAL SEQUENCE
  Synthetic Construct
TKENTK

SEQ ID NO: 18652 - protein, 6 aa, ARTIFICIAL SEQUENCE
  Synthetic Construct
TKENYK

SEQ ID NO: 18653 - protein, 6 aa, ARTIFICIAL SEQUENCE
  Synthetic Construct
TKEQAK

SEQ ID NO: 18654 - protein, 6 aa, ARTIFICIAL SEQUENCE
  Synthetic Construct
TKEQDK

SEQ ID NO: 18655 - protein, 6 aa, ARTIFICIAL SEQUENCE
  Synthetic Construct
TKEQEK

SEQ ID NO: 18656 - protein, 6 aa, ARTIFICIAL SEQUENCE
  Synthetic Construct
TKEQFK

SEQ ID NO: 18657 - protein, 6 aa, ARTIFICIAL SEQUENCE
  Synthetic Construct
TKEQGK

SEQ ID NO: 18658 - protein, 6 aa, ARTIFICIAL SEQUENCE
  Synthetic Construct
TKEQHK

SEQ ID NO: 18659 - protein, 6 aa, ARTIFICIAL SEQUENCE
  Synthetic Construct
TKEQIK

SEQ ID NO: 18660 - protein, 6 aa, ARTIFICIAL SEQUENCE
  Synthetic Construct
TKEQLK

SEQ ID NO: 18661 - protein, 6 aa, ARTIFICIAL SEQUENCE
  Synthetic Construct
TKEQNK

SEQ ID NO: 18662 - protein, 6 aa, ARTIFICIAL SEQUENCE
  Synthetic Construct
TKEQQK

SEQ ID NO: 18663 - protein, 6 aa, ARTIFICIAL SEQUENCE
  Synthetic Construct
TKEQRK

SEQ ID NO: 18664 - protein, 6 aa, ARTIFICIAL SEQUENCE
  Synthetic Construct
TKEQSK

SEQ ID NO: 18665 - protein, 6 aa, ARTIFICIAL SEQUENCE
  Synthetic Construct
TKEQTK

SEQ ID NO: 18666 - protein, 6 aa, ARTIFICIAL SEQUENCE
  Synthetic Construct
TKEQYK

SEQ ID NO: 18667 - protein, 6 aa, ARTIFICIAL SEQUENCE
  Synthetic Construct
TKERAK

SEQ ID NO: 18668 - protein, 6 aa, ARTIFICIAL SEQUENCE
  Synthetic Construct
TKERDK

SEQ ID NO: 18669 - protein, 6 aa, ARTIFICIAL SEQUENCE
  Synthetic Construct
TKEREK

SEQ ID NO: 18670 - protein, 6 aa, ARTIFICIAL SEQUENCE
  Synthetic Construct
TKERFK

SEQ ID NO: 18671 - protein, 6 aa, ARTIFICIAL SEQUENCE
  Synthetic Construct
TKERGK

SEQ ID NO: 18672 - protein, 6 aa, ARTIFICIAL SEQUENCE
  Synthetic Construct
TKERHK

SEQ ID NO: 18673 - protein, 6 aa, ARTIFICIAL SEQUENCE
  Synthetic Construct
TKERIK

SEQ ID NO: 18674 - protein, 6 aa, ARTIFICIAL SEQUENCE
  Synthetic Construct
TKERLK

SEQ ID NO: 18675 - protein, 6 aa, ARTIFICIAL SEQUENCE
  Synthetic Construct
TKERNK

SEQ ID NO: 18676 - protein, 6 aa, ARTIFICIAL SEQUENCE
  Synthetic Construct
TKERQK

SEQ ID NO: 18677 - protein, 6 aa, ARTIFICIAL SEQUENCE
  Synthetic Construct
TKERRK

SEQ ID NO: 18678 - protein, 6 aa, ARTIFICIAL SEQUENCE
  Synthetic Construct
TKERSK

SEQ ID NO: 18679 - protein, 6 aa, ARTIFICIAL SEQUENCE
  Synthetic Construct
TKERTK

SEQ ID NO: 18680 - protein, 6 aa, ARTIFICIAL SEQUENCE
  Synthetic Construct
TKERYK

SEQ ID NO: 18681 - protein, 6 aa, ARTIFICIAL SEQUENCE
  Synthetic Construct
TKESAK

SEQ ID NO: 18682 - protein, 6 aa, ARTIFICIAL SEQUENCE
  Synthetic Construct
TKESDK

SEQ ID NO: 18683 - protein, 6 aa, ARTIFICIAL SEQUENCE
  Synthetic Construct
TKESEK

SEQ ID NO: 18684 - protein, 6 aa, ARTIFICIAL SEQUENCE
  Synthetic Construct
TKESFK

SEQ ID NO: 18685 - protein, 6 aa, ARTIFICIAL SEQUENCE
  Synthetic Construct
TKESGK

SEQ ID NO: 18686 - protein, 6 aa, ARTIFICIAL SEQUENCE
  Synthetic Construct
TKESHK

SEQ ID NO: 18687 - protein, 6 aa, ARTIFICIAL SEQUENCE
  Synthetic Construct
TKESIK

SEQ ID NO: 18688 - protein, 6 aa, ARTIFICIAL SEQUENCE
  Synthetic Construct
TKESLK

SEQ ID NO: 18689 - protein, 6 aa, ARTIFICIAL SEQUENCE
  Synthetic Construct
TKESNK

SEQ ID NO: 18690 - protein, 6 aa, ARTIFICIAL SEQUENCE
  Synthetic Construct
TKESQK

SEQ ID NO: 18691 - protein, 6 aa, ARTIFICIAL SEQUENCE
  Synthetic Construct
TKESRK

SEQ ID NO: 18692 - protein, 6 aa, ARTIFICIAL SEQUENCE
  Synthetic Construct
TKESSK

SEQ ID NO: 18693 - protein, 6 aa, ARTIFICIAL SEQUENCE
  Synthetic Construct
TKESTK

SEQ ID NO: 18694 - protein, 6 aa, ARTIFICIAL SEQUENCE
  Synthetic Construct
TKESYK

SEQ ID NO: 18695 - protein, 6 aa, ARTIFICIAL SEQUENCE
  Synthetic Construct
TKETAK

SEQ ID NO: 18696 - protein, 6 aa, ARTIFICIAL SEQUENCE
  Synthetic Construct
TKETDK

SEQ ID NO: 18697 - protein, 6 aa, ARTIFICIAL SEQUENCE
  Synthetic Construct
TKETEK

SEQ ID NO: 18698 - protein, 6 aa, ARTIFICIAL SEQUENCE
  Synthetic Construct
TKETFK

SEQ ID NO: 18699 - protein, 6 aa, ARTIFICIAL SEQUENCE
  Synthetic Construct
TKETGK

SEQ ID NO: 18700 - protein, 6 aa, ARTIFICIAL SEQUENCE
  Synthetic Construct
TKETHK

SEQ ID NO: 18701 - protein, 6 aa, ARTIFICIAL SEQUENCE
  Synthetic Construct
TKETIK

SEQ ID NO: 18702 - protein, 6 aa, ARTIFICIAL SEQUENCE
  Synthetic Construct
TKETLK

SEQ ID NO: 18703 - protein, 6 aa, ARTIFICIAL SEQUENCE
  Synthetic Construct
TKETNK

SEQ ID NO: 18704 - protein, 6 aa, ARTIFICIAL SEQUENCE
  Synthetic Construct
TKETQK

SEQ ID NO: 18705 - protein, 6 aa, ARTIFICIAL SEQUENCE
  Synthetic Construct
TKETRK

SEQ ID NO: 18706 - protein, 6 aa, ARTIFICIAL SEQUENCE
  Synthetic Construct
TKETSK

SEQ ID NO: 18707 - protein, 6 aa, ARTIFICIAL SEQUENCE
  Synthetic Construct
TKETTK

SEQ ID NO: 18708 - protein, 6 aa, ARTIFICIAL SEQUENCE
  Synthetic Construct
TKETYK

SEQ ID NO: 18709 - protein, 6 aa, ARTIFICIAL SEQUENCE
  Synthetic Construct
TKEYAK

SEQ ID NO: 18710 - protein, 6 aa, ARTIFICIAL SEQUENCE
  Synthetic Construct
TKEYDK

SEQ ID NO: 18711 - protein, 6 aa, ARTIFICIAL SEQUENCE
  Synthetic Construct
TKEYEK

SEQ ID NO: 18712 - protein, 6 aa, ARTIFICIAL SEQUENCE
  Synthetic Construct
TKEYFK

SEQ ID NO: 18713 - protein, 6 aa, ARTIFICIAL SEQUENCE
  Synthetic Construct
TKEYGK

SEQ ID NO: 18714 - protein, 6 aa, ARTIFICIAL SEQUENCE
  Synthetic Construct
TKEYHK

SEQ ID NO: 18715 - protein, 6 aa, ARTIFICIAL SEQUENCE
  Synthetic Construct
TKEYIK

SEQ ID NO: 18716 - protein, 6 aa, ARTIFICIAL SEQUENCE
  Synthetic Construct
TKEYLK

SEQ ID NO: 18717 - protein, 6 aa, ARTIFICIAL SEQUENCE
  Synthetic Construct
TKEYNK

SEQ ID NO: 18718 - protein, 6 aa, ARTIFICIAL SEQUENCE
  Synthetic Construct
TKEYQK

SEQ ID NO: 18719 - protein, 6 aa, ARTIFICIAL SEQUENCE
  Synthetic Construct
TKEYRK

SEQ ID NO: 18720 - protein, 6 aa, ARTIFICIAL SEQUENCE
  Synthetic Construct
TKEYSK

SEQ ID NO: 18721 - protein, 6 aa, ARTIFICIAL SEQUENCE
  Synthetic Construct
TKEYTK

SEQ ID NO: 18722 - protein, 6 aa, ARTIFICIAL SEQUENCE
  Synthetic Construct
TKEYYK

SEQ ID NO: 18723 - protein, 6 aa, ARTIFICIAL SEQUENCE
  Synthetic Construct
TKFAAK

SEQ ID NO: 18724 - protein, 6 aa, ARTIFICIAL SEQUENCE
  Synthetic Construct
TKFADK

SEQ ID NO: 18725 - protein, 6 aa, ARTIFICIAL SEQUENCE
  Synthetic Construct
TKFAEK

SEQ ID NO: 18726 - protein, 6 aa, ARTIFICIAL SEQUENCE
  Synthetic Construct
TKFAFK

SEQ ID NO: 18727 - protein, 6 aa, ARTIFICIAL SEQUENCE
  Synthetic Construct
TKFAGK

SEQ ID NO: 18728 - protein, 6 aa, ARTIFICIAL SEQUENCE
  Synthetic Construct
TKFAHK

SEQ ID NO: 18729 - protein, 6 aa, ARTIFICIAL SEQUENCE
  Synthetic Construct
TKFAIK

SEQ ID NO: 18730 - protein, 6 aa, ARTIFICIAL SEQUENCE
  Synthetic Construct
TKFALK

SEQ ID NO: 18731 - protein, 6 aa, ARTIFICIAL SEQUENCE
  Synthetic Construct
TKFANK

SEQ ID NO: 18732 - protein, 6 aa, ARTIFICIAL SEQUENCE
  Synthetic Construct
TKFAQK

SEQ ID NO: 18733 - protein, 6 aa, ARTIFICIAL SEQUENCE
  Synthetic Construct
TKFARK

SEQ ID NO: 18734 - protein, 6 aa, ARTIFICIAL SEQUENCE
  Synthetic Construct
TKFASK

SEQ ID NO: 18735 - protein, 6 aa, ARTIFICIAL SEQUENCE
  Synthetic Construct
TKFATK

SEQ ID NO: 18736 - protein, 6 aa, ARTIFICIAL SEQUENCE
  Synthetic Construct
TKFAYK

SEQ ID NO: 18737 - protein, 6 aa, ARTIFICIAL SEQUENCE
  Synthetic Construct
TKFDAK

SEQ ID NO: 18738 - protein, 6 aa, ARTIFICIAL SEQUENCE
  Synthetic Construct
TKFDDK

SEQ ID NO: 18739 - protein, 6 aa, ARTIFICIAL SEQUENCE
  Synthetic Construct
TKFDEK

SEQ ID NO: 18740 - protein, 6 aa, ARTIFICIAL SEQUENCE
  Synthetic Construct
TKFDFK

SEQ ID NO: 18741 - protein, 6 aa, ARTIFICIAL SEQUENCE
  Synthetic Construct
TKFDGK

SEQ ID NO: 18742 - protein, 6 aa, ARTIFICIAL SEQUENCE
  Synthetic Construct
TKFDHK

SEQ ID NO: 18743 - protein, 6 aa, ARTIFICIAL SEQUENCE
  Synthetic Construct
TKFDIK

SEQ ID NO: 18744 - protein, 6 aa, ARTIFICIAL SEQUENCE
  Synthetic Construct
TKFDLK

SEQ ID NO: 18745 - protein, 6 aa, ARTIFICIAL SEQUENCE
  Synthetic Construct
TKFDNK

SEQ ID NO: 18746 - protein, 6 aa, ARTIFICIAL SEQUENCE
  Synthetic Construct
TKFDQK

SEQ ID NO: 18747 - protein, 6 aa, ARTIFICIAL SEQUENCE
  Synthetic Construct
TKFDRK

SEQ ID NO: 18748 - protein, 6 aa, ARTIFICIAL SEQUENCE
  Synthetic Construct
TKFDSK

SEQ ID NO: 18749 - protein, 6 aa, ARTIFICIAL SEQUENCE
  Synthetic Construct
TKFDTK

SEQ ID NO: 18750 - protein, 6 aa, ARTIFICIAL SEQUENCE
  Synthetic Construct
TKFDYK

SEQ ID NO: 18751 - protein, 6 aa, ARTIFICIAL SEQUENCE
  Synthetic Construct
TKFEAK

SEQ ID NO: 18752 - protein, 6 aa, ARTIFICIAL SEQUENCE
  Synthetic Construct
TKFEDK

SEQ ID NO: 18753 - protein, 6 aa, ARTIFICIAL SEQUENCE
  Synthetic Construct
TKFEEK

SEQ ID NO: 18754 - protein, 6 aa, ARTIFICIAL SEQUENCE
  Synthetic Construct
TKFEFK

SEQ ID NO: 18755 - protein, 6 aa, ARTIFICIAL SEQUENCE
  Synthetic Construct
TKFEGK

SEQ ID NO: 18756 - protein, 6 aa, ARTIFICIAL SEQUENCE
  Synthetic Construct
TKFEHK

SEQ ID NO: 18757 - protein, 6 aa, ARTIFICIAL SEQUENCE
  Synthetic Construct
TKFEIK

SEQ ID NO: 18758 - protein, 6 aa, ARTIFICIAL SEQUENCE
  Synthetic Construct
TKFELK

SEQ ID NO: 18759 - protein, 6 aa, ARTIFICIAL SEQUENCE
  Synthetic Construct
TKFENK

SEQ ID NO: 18760 - protein, 6 aa, ARTIFICIAL SEQUENCE
  Synthetic Construct
TKFEQK

SEQ ID NO: 18761 - protein, 6 aa, ARTIFICIAL SEQUENCE
  Synthetic Construct
TKFERK

SEQ ID NO: 18762 - protein, 6 aa, ARTIFICIAL SEQUENCE
  Synthetic Construct
TKFESK

SEQ ID NO: 18763 - protein, 6 aa, ARTIFICIAL SEQUENCE
  Synthetic Construct
TKFETK

SEQ ID NO: 18764 - protein, 6 aa, ARTIFICIAL SEQUENCE
  Synthetic Construct
TKFEYK

SEQ ID NO: 18765 - protein, 6 aa, ARTIFICIAL SEQUENCE
  Synthetic Construct
TKFFAK

SEQ ID NO: 18766 - protein, 6 aa, ARTIFICIAL SEQUENCE
  Synthetic Construct
TKFFDK

SEQ ID NO: 18767 - protein, 6 aa, ARTIFICIAL SEQUENCE
  Synthetic Construct
TKFFEK

SEQ ID NO: 18768 - protein, 6 aa, ARTIFICIAL SEQUENCE
  Synthetic Construct
TKFFFK

SEQ ID NO: 18769 - protein, 6 aa, ARTIFICIAL SEQUENCE
  Synthetic Construct
TKFFGK

SEQ ID NO: 18770 - protein, 6 aa, ARTIFICIAL SEQUENCE
  Synthetic Construct
TKFFHK

SEQ ID NO: 18771 - protein, 6 aa, ARTIFICIAL SEQUENCE
  Synthetic Construct
TKFFIK

SEQ ID NO: 18772 - protein, 6 aa, ARTIFICIAL SEQUENCE
  Synthetic Construct
TKFFLK

SEQ ID NO: 18773 - protein, 6 aa, ARTIFICIAL SEQUENCE
  Synthetic Construct
TKFFNK

SEQ ID NO: 18774 - protein, 6 aa, ARTIFICIAL SEQUENCE
  Synthetic Construct
TKFFQK

SEQ ID NO: 18775 - protein, 6 aa, ARTIFICIAL SEQUENCE
  Synthetic Construct
TKFFRK

SEQ ID NO: 18776 - protein, 6 aa, ARTIFICIAL SEQUENCE
  Synthetic Construct
TKFFSK

SEQ ID NO: 18777 - protein, 6 aa, ARTIFICIAL SEQUENCE
  Synthetic Construct
TKFFTK

SEQ ID NO: 18778 - protein, 6 aa, ARTIFICIAL SEQUENCE
  Synthetic Construct
TKFFYK

SEQ ID NO: 18779 - protein, 6 aa, ARTIFICIAL SEQUENCE
  Synthetic Construct
TKFGAK

SEQ ID NO: 18780 - protein, 6 aa, ARTIFICIAL SEQUENCE
  Synthetic Construct
TKFGDK

SEQ ID NO: 18781 - protein, 6 aa, ARTIFICIAL SEQUENCE
  Synthetic Construct
TKFGEK

SEQ ID NO: 18782 - protein, 6 aa, ARTIFICIAL SEQUENCE
  Synthetic Construct
TKFGFK

SEQ ID NO: 18783 - protein, 6 aa, ARTIFICIAL SEQUENCE
  Synthetic Construct
TKFGGK

SEQ ID NO: 18784 - protein, 6 aa, ARTIFICIAL SEQUENCE
  Synthetic Construct
TKFGHK

SEQ ID NO: 18785 - protein, 6 aa, ARTIFICIAL SEQUENCE
  Synthetic Construct
TKFGIK

SEQ ID NO: 18786 - protein, 6 aa, ARTIFICIAL SEQUENCE
  Synthetic Construct
TKFGLK

SEQ ID NO: 18787 - protein, 6 aa, ARTIFICIAL SEQUENCE
  Synthetic Construct
TKFGNK

SEQ ID NO: 18788 - protein, 6 aa, ARTIFICIAL SEQUENCE
  Synthetic Construct
TKFGQK

SEQ ID NO: 18789 - protein, 6 aa, ARTIFICIAL SEQUENCE
  Synthetic Construct
TKFGRK

SEQ ID NO: 18790 - protein, 6 aa, ARTIFICIAL SEQUENCE
  Synthetic Construct
TKFGSK

SEQ ID NO: 18791 - protein, 6 aa, ARTIFICIAL SEQUENCE
  Synthetic Construct
TKFGTK

SEQ ID NO: 18792 - protein, 6 aa, ARTIFICIAL SEQUENCE
  Synthetic Construct
TKFGYK

SEQ ID NO: 18793 - protein, 6 aa, ARTIFICIAL SEQUENCE
  Synthetic Construct
TKFHAK

SEQ ID NO: 18794 - protein, 6 aa, ARTIFICIAL SEQUENCE
  Synthetic Construct
TKFHDK

SEQ ID NO: 18795 - protein, 6 aa, ARTIFICIAL SEQUENCE
  Synthetic Construct
TKFHEK

SEQ ID NO: 18796 - protein, 6 aa, ARTIFICIAL SEQUENCE
  Synthetic Construct
TKFHFK

SEQ ID NO: 18797 - protein, 6 aa, ARTIFICIAL SEQUENCE
  Synthetic Construct
TKFHGK

SEQ ID NO: 18798 - protein, 6 aa, ARTIFICIAL SEQUENCE
  Synthetic Construct
TKFHHK

SEQ ID NO: 18799 - protein, 6 aa, ARTIFICIAL SEQUENCE
  Synthetic Construct
TKFHIK

SEQ ID NO: 18800 - protein, 6 aa, ARTIFICIAL SEQUENCE
  Synthetic Construct
TKFHLK

SEQ ID NO: 18801 - protein, 6 aa, ARTIFICIAL SEQUENCE
  Synthetic Construct
TKFHNK

SEQ ID NO: 18802 - protein, 6 aa, ARTIFICIAL SEQUENCE
  Synthetic Construct
TKFHQK

SEQ ID NO: 18803 - protein, 6 aa, ARTIFICIAL SEQUENCE
  Synthetic Construct
TKFHRK

SEQ ID NO: 18804 - protein, 6 aa, ARTIFICIAL SEQUENCE
  Synthetic Construct
TKFHSK

SEQ ID NO: 18805 - protein, 6 aa, ARTIFICIAL SEQUENCE
  Synthetic Construct
TKFHTK

SEQ ID NO: 18806 - protein, 6 aa, ARTIFICIAL SEQUENCE
  Synthetic Construct
TKFHYK

SEQ ID NO: 18807 - protein, 6 aa, ARTIFICIAL SEQUENCE
  Synthetic Construct
TKFIAK

SEQ ID NO: 18808 - protein, 6 aa, ARTIFICIAL SEQUENCE
  Synthetic Construct
TKFIDK

SEQ ID NO: 18809 - protein, 6 aa, ARTIFICIAL SEQUENCE
  Synthetic Construct
TKFIEK

SEQ ID NO: 18810 - protein, 6 aa, ARTIFICIAL SEQUENCE
  Synthetic Construct
TKFIFK

SEQ ID NO: 18811 - protein, 6 aa, ARTIFICIAL SEQUENCE
  Synthetic Construct
TKFIGK

SEQ ID NO: 18812 - protein, 6 aa, ARTIFICIAL SEQUENCE
  Synthetic Construct
TKFIHK

SEQ ID NO: 18813 - protein, 6 aa, ARTIFICIAL SEQUENCE
  Synthetic Construct
TKFIIK

SEQ ID NO: 18814 - protein, 6 aa, ARTIFICIAL SEQUENCE
  Synthetic Construct
TKFILK

SEQ ID NO: 18815 - protein, 6 aa, ARTIFICIAL SEQUENCE
  Synthetic Construct
TKFINK

SEQ ID NO: 18816 - protein, 6 aa, ARTIFICIAL SEQUENCE
  Synthetic Construct
TKFIQK

SEQ ID NO: 18817 - protein, 6 aa, ARTIFICIAL SEQUENCE
  Synthetic Construct
TKFIRK

SEQ ID NO: 18818 - protein, 6 aa, ARTIFICIAL SEQUENCE
  Synthetic Construct
TKFISK

SEQ ID NO: 18819 - protein, 6 aa, ARTIFICIAL SEQUENCE
  Synthetic Construct
TKFITK

SEQ ID NO: 18820 - protein, 6 aa, ARTIFICIAL SEQUENCE
  Synthetic Construct
TKFIYK

SEQ ID NO: 18821 - protein, 6 aa, ARTIFICIAL SEQUENCE
  Synthetic Construct
TKFLAK

SEQ ID NO: 18822 - protein, 6 aa, ARTIFICIAL SEQUENCE
  Synthetic Construct
TKFLDK

SEQ ID NO: 18823 - protein, 6 aa, ARTIFICIAL SEQUENCE
  Synthetic Construct
TKFLEK

SEQ ID NO: 18824 - protein, 6 aa, ARTIFICIAL SEQUENCE
  Synthetic Construct
TKFLFK

SEQ ID NO: 18825 - protein, 6 aa, ARTIFICIAL SEQUENCE
  Synthetic Construct
TKFLGK

SEQ ID NO: 18826 - protein, 6 aa, ARTIFICIAL SEQUENCE
  Synthetic Construct
TKFLHK

SEQ ID NO: 18827 - protein, 6 aa, ARTIFICIAL SEQUENCE
  Synthetic Construct
TKFLIK

SEQ ID NO: 18828 - protein, 6 aa, ARTIFICIAL SEQUENCE
  Synthetic Construct
TKFLLK

SEQ ID NO: 18829 - protein, 6 aa, ARTIFICIAL SEQUENCE
  Synthetic Construct
TKFLNK

SEQ ID NO: 18830 - protein, 6 aa, ARTIFICIAL SEQUENCE
  Synthetic Construct
TKFLQK

SEQ ID NO: 18831 - protein, 6 aa, ARTIFICIAL SEQUENCE
  Synthetic Construct
TKFLRK

SEQ ID NO: 18832 - protein, 6 aa, ARTIFICIAL SEQUENCE
  Synthetic Construct
TKFLSK

SEQ ID NO: 18833 - protein, 6 aa, ARTIFICIAL SEQUENCE
  Synthetic Construct
TKFLTK

SEQ ID NO: 18834 - protein, 6 aa, ARTIFICIAL SEQUENCE
  Synthetic Construct
TKFLYK

SEQ ID NO: 18835 - protein, 6 aa, ARTIFICIAL SEQUENCE
  Synthetic Construct
TKFNAK

SEQ ID NO: 18836 - protein, 6 aa, ARTIFICIAL SEQUENCE
  Synthetic Construct
TKFNDK

SEQ ID NO: 18837 - protein, 6 aa, ARTIFICIAL SEQUENCE
  Synthetic Construct
TKFNEK

SEQ ID NO: 18838 - protein, 6 aa, ARTIFICIAL SEQUENCE
  Synthetic Construct
TKFNFK

SEQ ID NO: 18839 - protein, 6 aa, ARTIFICIAL SEQUENCE
  Synthetic Construct
TKFNGK

SEQ ID NO: 18840 - protein, 6 aa, ARTIFICIAL SEQUENCE
  Synthetic Construct
TKFNHK

SEQ ID NO: 18841 - protein, 6 aa, ARTIFICIAL SEQUENCE
  Synthetic Construct
TKFNIK

SEQ ID NO: 18842 - protein, 6 aa, ARTIFICIAL SEQUENCE
  Synthetic Construct
TKFNLK

SEQ ID NO: 18843 - protein, 6 aa, ARTIFICIAL SEQUENCE
  Synthetic Construct
TKFNNK

SEQ ID NO: 18844 - protein, 6 aa, ARTIFICIAL SEQUENCE
  Synthetic Construct
TKFNQK

SEQ ID NO: 18845 - protein, 6 aa, ARTIFICIAL SEQUENCE
  Synthetic Construct
TKFNRK

SEQ ID NO: 18846 - protein, 6 aa, ARTIFICIAL SEQUENCE
  Synthetic Construct
TKFNSK

SEQ ID NO: 18847 - protein, 6 aa, ARTIFICIAL SEQUENCE
  Synthetic Construct
TKFNTK

SEQ ID NO: 18848 - protein, 6 aa, ARTIFICIAL SEQUENCE
  Synthetic Construct
TKFNYK

SEQ ID NO: 18849 - protein, 6 aa, ARTIFICIAL SEQUENCE
  Synthetic Construct
TKFQAK

SEQ ID NO: 18850 - protein, 6 aa, ARTIFICIAL SEQUENCE
  Synthetic Construct
TKFQDK

SEQ ID NO: 18851 - protein, 6 aa, ARTIFICIAL SEQUENCE
  Synthetic Construct
TKFQEK

SEQ ID NO: 18852 - protein, 6 aa, ARTIFICIAL SEQUENCE
  Synthetic Construct
TKFQFK

SEQ ID NO: 18853 - protein, 6 aa, ARTIFICIAL SEQUENCE
  Synthetic Construct
TKFQGK

SEQ ID NO: 18854 - protein, 6 aa, ARTIFICIAL SEQUENCE
  Synthetic Construct
TKFQHK

SEQ ID NO: 18855 - protein, 6 aa, ARTIFICIAL SEQUENCE
  Synthetic Construct
TKFQIK

SEQ ID NO: 18856 - protein, 6 aa, ARTIFICIAL SEQUENCE
  Synthetic Construct
TKFQLK

SEQ ID NO: 18857 - protein, 6 aa, ARTIFICIAL SEQUENCE
  Synthetic Construct
TKFQNK

SEQ ID NO: 18858 - protein, 6 aa, ARTIFICIAL SEQUENCE
  Synthetic Construct
TKFQQK

SEQ ID NO: 18859 - protein, 6 aa, ARTIFICIAL SEQUENCE
  Synthetic Construct
TKFQRK

SEQ ID NO: 18860 - protein, 6 aa, ARTIFICIAL SEQUENCE
  Synthetic Construct
TKFQSK

SEQ ID NO: 18861 - protein, 6 aa, ARTIFICIAL SEQUENCE
  Synthetic Construct
TKFQTK

SEQ ID NO: 18862 - protein, 6 aa, ARTIFICIAL SEQUENCE
  Synthetic Construct
TKFQYK

SEQ ID NO: 18863 - protein, 6 aa, ARTIFICIAL SEQUENCE
  Synthetic Construct
TKFRAK

SEQ ID NO: 18864 - protein, 6 aa, ARTIFICIAL SEQUENCE
  Synthetic Construct
TKFRDK

SEQ ID NO: 18865 - protein, 6 aa, ARTIFICIAL SEQUENCE
  Synthetic Construct
TKFREK

SEQ ID NO: 18866 - protein, 6 aa, ARTIFICIAL SEQUENCE
  Synthetic Construct
TKFRFK

SEQ ID NO: 18867 - protein, 6 aa, ARTIFICIAL SEQUENCE
  Synthetic Construct
TKFRGK

SEQ ID NO: 18868 - protein, 6 aa, ARTIFICIAL SEQUENCE
  Synthetic Construct
TKFRHK

SEQ ID NO: 18869 - protein, 6 aa, ARTIFICIAL SEQUENCE
  Synthetic Construct
TKFRIK

SEQ ID NO: 18870 - protein, 6 aa, ARTIFICIAL SEQUENCE
  Synthetic Construct
TKFRLK

SEQ ID NO: 18871 - protein, 6 aa, ARTIFICIAL SEQUENCE
  Synthetic Construct
TKFRNK

SEQ ID NO: 18872 - protein, 6 aa, ARTIFICIAL SEQUENCE
  Synthetic Construct
TKFRQK

SEQ ID NO: 18873 - protein, 6 aa, ARTIFICIAL SEQUENCE
  Synthetic Construct
TKFRRK

SEQ ID NO: 18874 - protein, 6 aa, ARTIFICIAL SEQUENCE
  Synthetic Construct
TKFRSK

SEQ ID NO: 18875 - protein, 6 aa, ARTIFICIAL SEQUENCE
  Synthetic Construct
TKFRTK

SEQ ID NO: 18876 - protein, 6 aa, ARTIFICIAL SEQUENCE
  Synthetic Construct
TKFRYK

SEQ ID NO: 18877 - protein, 6 aa, ARTIFICIAL SEQUENCE
  Synthetic Construct
TKFSAK

SEQ ID NO: 18878 - protein, 6 aa, ARTIFICIAL SEQUENCE
  Synthetic Construct
TKFSDK

SEQ ID NO: 18879 - protein, 6 aa, ARTIFICIAL SEQUENCE
  Synthetic Construct
TKFSEK

SEQ ID NO: 18880 - protein, 6 aa, ARTIFICIAL SEQUENCE
  Synthetic Construct
TKFSFK

SEQ ID NO: 18881 - protein, 6 aa, ARTIFICIAL SEQUENCE
  Synthetic Construct
TKFSGK

SEQ ID NO: 18882 - protein, 6 aa, ARTIFICIAL SEQUENCE
  Synthetic Construct
TKFSHK

SEQ ID NO: 18883 - protein, 6 aa, ARTIFICIAL SEQUENCE
  Synthetic Construct
TKFSIK

SEQ ID NO: 18884 - protein, 6 aa, ARTIFICIAL SEQUENCE
  Synthetic Construct
TKFSLK

SEQ ID NO: 18885 - protein, 6 aa, ARTIFICIAL SEQUENCE
  Synthetic Construct
TKFSNK

SEQ ID NO: 18886 - protein, 6 aa, ARTIFICIAL SEQUENCE
  Synthetic Construct
TKFSQK

SEQ ID NO: 18887 - protein, 6 aa, ARTIFICIAL SEQUENCE
  Synthetic Construct
TKFSRK

SEQ ID NO: 18888 - protein, 6 aa, ARTIFICIAL SEQUENCE
  Synthetic Construct
TKFSSK

SEQ ID NO: 18889 - protein, 6 aa, ARTIFICIAL SEQUENCE
  Synthetic Construct
TKFSTK

SEQ ID NO: 18890 - protein, 6 aa, ARTIFICIAL SEQUENCE
  Synthetic Construct
TKFSYK

SEQ ID NO: 18891 - protein, 6 aa, ARTIFICIAL SEQUENCE
  Synthetic Construct
TKFTAK

SEQ ID NO: 18892 - protein, 6 aa, ARTIFICIAL SEQUENCE
  Synthetic Construct
TKFTDK

SEQ ID NO: 18893 - protein, 6 aa, ARTIFICIAL SEQUENCE
  Synthetic Construct
TKFTEK

SEQ ID NO: 18894 - protein, 6 aa, ARTIFICIAL SEQUENCE
  Synthetic Construct
TKFTFK

SEQ ID NO: 18895 - protein, 6 aa, ARTIFICIAL SEQUENCE
  Synthetic Construct
TKFTGK

SEQ ID NO: 18896 - protein, 6 aa, ARTIFICIAL SEQUENCE
  Synthetic Construct
TKFTHK

SEQ ID NO: 18897 - protein, 6 aa, ARTIFICIAL SEQUENCE
  Synthetic Construct
TKFTIK

SEQ ID NO: 18898 - protein, 6 aa, ARTIFICIAL SEQUENCE
  Synthetic Construct
TKFTLK

SEQ ID NO: 18899 - protein, 6 aa, ARTIFICIAL SEQUENCE
  Synthetic Construct
TKFTNK

SEQ ID NO: 18900 - protein, 6 aa, ARTIFICIAL SEQUENCE
  Synthetic Construct
TKFTQK

SEQ ID NO: 18901 - protein, 6 aa, ARTIFICIAL SEQUENCE
  Synthetic Construct
TKFTRK

SEQ ID NO: 18902 - protein, 6 aa, ARTIFICIAL SEQUENCE
  Synthetic Construct
TKFTSK

SEQ ID NO: 18903 - protein, 6 aa, ARTIFICIAL SEQUENCE
  Synthetic Construct
TKFTTK

SEQ ID NO: 18904 - protein, 6 aa, ARTIFICIAL SEQUENCE
  Synthetic Construct
TKFTYK

SEQ ID NO: 18905 - protein, 6 aa, ARTIFICIAL SEQUENCE
  Synthetic Construct
TKFYAK

SEQ ID NO: 18906 - protein, 6 aa, ARTIFICIAL SEQUENCE
  Synthetic Construct
TKFYDK

SEQ ID NO: 18907 - protein, 6 aa, ARTIFICIAL SEQUENCE
  Synthetic Construct
TKFYEK

SEQ ID NO: 18908 - protein, 6 aa, ARTIFICIAL SEQUENCE
  Synthetic Construct
TKFYFK

SEQ ID NO: 18909 - protein, 6 aa, ARTIFICIAL SEQUENCE
  Synthetic Construct
TKFYGK

SEQ ID NO: 18910 - protein, 6 aa, ARTIFICIAL SEQUENCE
  Synthetic Construct
TKFYHK

SEQ ID NO: 18911 - protein, 6 aa, ARTIFICIAL SEQUENCE
  Synthetic Construct
TKFYIK

SEQ ID NO: 18912 - protein, 6 aa, ARTIFICIAL SEQUENCE
  Synthetic Construct
TKFYLK

SEQ ID NO: 18913 - protein, 6 aa, ARTIFICIAL SEQUENCE
  Synthetic Construct
TKFYNK

SEQ ID NO: 18914 - protein, 6 aa, ARTIFICIAL SEQUENCE
  Synthetic Construct
TKFYQK

SEQ ID NO: 18915 - protein, 6 aa, ARTIFICIAL SEQUENCE
  Synthetic Construct
TKFYRK

SEQ ID NO: 18916 - protein, 6 aa, ARTIFICIAL SEQUENCE
  Synthetic Construct
TKFYSK

SEQ ID NO: 18917 - protein, 6 aa, ARTIFICIAL SEQUENCE
  Synthetic Construct
TKFYTK

SEQ ID NO: 18918 - protein, 6 aa, ARTIFICIAL SEQUENCE
  Synthetic Construct
TKFYYK

SEQ ID NO: 18919 - protein, 6 aa, ARTIFICIAL SEQUENCE
  Synthetic Construct
TKGAAK

SEQ ID NO: 18920 - protein, 6 aa, ARTIFICIAL SEQUENCE
  Synthetic Construct
TKGADK

SEQ ID NO: 18921 - protein, 6 aa, ARTIFICIAL SEQUENCE
  Synthetic Construct
TKGAEK

SEQ ID NO: 18922 - protein, 6 aa, ARTIFICIAL SEQUENCE
  Synthetic Construct
TKGAFK

SEQ ID NO: 18923 - protein, 6 aa, ARTIFICIAL SEQUENCE
  Synthetic Construct
TKGAGK

SEQ ID NO: 18924 - protein, 6 aa, ARTIFICIAL SEQUENCE
  Synthetic Construct
TKGAHK

SEQ ID NO: 18925 - protein, 6 aa, ARTIFICIAL SEQUENCE
  Synthetic Construct
TKGAIK

SEQ ID NO: 18926 - protein, 6 aa, ARTIFICIAL SEQUENCE
  Synthetic Construct
TKGALK

SEQ ID NO: 18927 - protein, 6 aa, ARTIFICIAL SEQUENCE
  Synthetic Construct
TKGANK

SEQ ID NO: 18928 - protein, 6 aa, ARTIFICIAL SEQUENCE
  Synthetic Construct
TKGAQK

SEQ ID NO: 18929 - protein, 6 aa, ARTIFICIAL SEQUENCE
  Synthetic Construct
TKGARK

SEQ ID NO: 18930 - protein, 6 aa, ARTIFICIAL SEQUENCE
  Synthetic Construct
TKGASK

SEQ ID NO: 18931 - protein, 6 aa, ARTIFICIAL SEQUENCE
  Synthetic Construct
TKGATK

SEQ ID NO: 18932 - protein, 6 aa, ARTIFICIAL SEQUENCE
  Synthetic Construct
TKGAYK

SEQ ID NO: 18933 - protein, 6 aa, ARTIFICIAL SEQUENCE
  Synthetic Construct
TKGDAK

SEQ ID NO: 18934 - protein, 6 aa, ARTIFICIAL SEQUENCE
  Synthetic Construct
TKGDDK

SEQ ID NO: 18935 - protein, 6 aa, ARTIFICIAL SEQUENCE
  Synthetic Construct
TKGDEK

SEQ ID NO: 18936 - protein, 6 aa, ARTIFICIAL SEQUENCE
  Synthetic Construct
TKGDFK

SEQ ID NO: 18937 - protein, 6 aa, ARTIFICIAL SEQUENCE
  Synthetic Construct
TKGDGK

SEQ ID NO: 18938 - protein, 6 aa, ARTIFICIAL SEQUENCE
  Synthetic Construct
TKGDHK

SEQ ID NO: 18939 - protein, 6 aa, ARTIFICIAL SEQUENCE
  Synthetic Construct
TKGDIK

SEQ ID NO: 18940 - protein, 6 aa, ARTIFICIAL SEQUENCE
  Synthetic Construct
TKGDLK

SEQ ID NO: 18941 - protein, 6 aa, ARTIFICIAL SEQUENCE
  Synthetic Construct
TKGDNK

SEQ ID NO: 18942 - protein, 6 aa, ARTIFICIAL SEQUENCE
  Synthetic Construct
TKGDQK

SEQ ID NO: 18943 - protein, 6 aa, ARTIFICIAL SEQUENCE
  Synthetic Construct
TKGDRK

SEQ ID NO: 18944 - protein, 6 aa, ARTIFICIAL SEQUENCE
  Synthetic Construct
TKGDSK

SEQ ID NO: 18945 - protein, 6 aa, ARTIFICIAL SEQUENCE
  Synthetic Construct
TKGDTK

SEQ ID NO: 18946 - protein, 6 aa, ARTIFICIAL SEQUENCE
  Synthetic Construct
TKGDYK

SEQ ID NO: 18947 - protein, 6 aa, ARTIFICIAL SEQUENCE
  Synthetic Construct
TKGEAK

SEQ ID NO: 18948 - protein, 6 aa, ARTIFICIAL SEQUENCE
  Synthetic Construct
TKGEDK

SEQ ID NO: 18949 - protein, 6 aa, ARTIFICIAL SEQUENCE
  Synthetic Construct
TKGEEK

SEQ ID NO: 18950 - protein, 6 aa, ARTIFICIAL SEQUENCE
  Synthetic Construct
TKGEFK

SEQ ID NO: 18951 - protein, 6 aa, ARTIFICIAL SEQUENCE
  Synthetic Construct
TKGEGK

SEQ ID NO: 18952 - protein, 6 aa, ARTIFICIAL SEQUENCE
  Synthetic Construct
TKGEHK

SEQ ID NO: 18953 - protein, 6 aa, ARTIFICIAL SEQUENCE
  Synthetic Construct
TKGEIK

SEQ ID NO: 18954 - protein, 6 aa, ARTIFICIAL SEQUENCE
  Synthetic Construct
TKGELK

SEQ ID NO: 18955 - protein, 6 aa, ARTIFICIAL SEQUENCE
  Synthetic Construct
TKGENK

SEQ ID NO: 18956 - protein, 6 aa, ARTIFICIAL SEQUENCE
  Synthetic Construct
TKGEQK

SEQ ID NO: 18957 - protein, 6 aa, ARTIFICIAL SEQUENCE
  Synthetic Construct
TKGERK

SEQ ID NO: 18958 - protein, 6 aa, ARTIFICIAL SEQUENCE
  Synthetic Construct
TKGESK

SEQ ID NO: 18959 - protein, 6 aa, ARTIFICIAL SEQUENCE
  Synthetic Construct
TKGETK

SEQ ID NO: 18960 - protein, 6 aa, ARTIFICIAL SEQUENCE
  Synthetic Construct
TKGEYK

SEQ ID NO: 18961 - protein, 6 aa, ARTIFICIAL SEQUENCE
  Synthetic Construct
TKGFAK

SEQ ID NO: 18962 - protein, 6 aa, ARTIFICIAL SEQUENCE
  Synthetic Construct
TKGFDK

SEQ ID NO: 18963 - protein, 6 aa, ARTIFICIAL SEQUENCE
  Synthetic Construct
TKGFEK

SEQ ID NO: 18964 - protein, 6 aa, ARTIFICIAL SEQUENCE
  Synthetic Construct
TKGFFK

SEQ ID NO: 18965 - protein, 6 aa, ARTIFICIAL SEQUENCE
  Synthetic Construct
TKGFGK

SEQ ID NO: 18966 - protein, 6 aa, ARTIFICIAL SEQUENCE
  Synthetic Construct
TKGFHK

SEQ ID NO: 18967 - protein, 6 aa, ARTIFICIAL SEQUENCE
  Synthetic Construct
TKGFIK

SEQ ID NO: 18968 - protein, 6 aa, ARTIFICIAL SEQUENCE
  Synthetic Construct
TKGFLK

SEQ ID NO: 18969 - protein, 6 aa, ARTIFICIAL SEQUENCE
  Synthetic Construct
TKGFNK

SEQ ID NO: 18970 - protein, 6 aa, ARTIFICIAL SEQUENCE
  Synthetic Construct
TKGFQK

SEQ ID NO: 18971 - protein, 6 aa, ARTIFICIAL SEQUENCE
  Synthetic Construct
TKGFRK

SEQ ID NO: 18972 - protein, 6 aa, ARTIFICIAL SEQUENCE
  Synthetic Construct
TKGFSK

SEQ ID NO: 18973 - protein, 6 aa, ARTIFICIAL SEQUENCE
  Synthetic Construct
TKGFTK

SEQ ID NO: 18974 - protein, 6 aa, ARTIFICIAL SEQUENCE
  Synthetic Construct
TKGFYK

SEQ ID NO: 18975 - protein, 6 aa, ARTIFICIAL SEQUENCE
  Synthetic Construct
TKGGAK

SEQ ID NO: 18976 - protein, 6 aa, ARTIFICIAL SEQUENCE
  Synthetic Construct
TKGGDK

SEQ ID NO: 18977 - protein, 6 aa, ARTIFICIAL SEQUENCE
  Synthetic Construct
TKGGEK

SEQ ID NO: 18978 - protein, 6 aa, ARTIFICIAL SEQUENCE
  Synthetic Construct
TKGGFK

SEQ ID NO: 18979 - protein, 6 aa, ARTIFICIAL SEQUENCE
  Synthetic Construct
TKGGGK

SEQ ID NO: 18980 - protein, 6 aa, ARTIFICIAL SEQUENCE
  Synthetic Construct
TKGGHK

SEQ ID NO: 18981 - protein, 6 aa, ARTIFICIAL SEQUENCE
  Synthetic Construct
TKGGIK

SEQ ID NO: 18982 - protein, 6 aa, ARTIFICIAL SEQUENCE
  Synthetic Construct
TKGGLK

SEQ ID NO: 18983 - protein, 6 aa, ARTIFICIAL SEQUENCE
  Synthetic Construct
TKGGNK

SEQ ID NO: 18984 - protein, 6 aa, ARTIFICIAL SEQUENCE
  Synthetic Construct
TKGGQK

SEQ ID NO: 18985 - protein, 6 aa, ARTIFICIAL SEQUENCE
  Synthetic Construct
TKGGRK

SEQ ID NO: 18986 - protein, 6 aa, ARTIFICIAL SEQUENCE
  Synthetic Construct
TKGGSK

SEQ ID NO: 18987 - protein, 6 aa, ARTIFICIAL SEQUENCE
  Synthetic Construct
TKGGTK

SEQ ID NO: 18988 - protein, 6 aa, ARTIFICIAL SEQUENCE
  Synthetic Construct
TKGGYK

SEQ ID NO: 18989 - protein, 6 aa, ARTIFICIAL SEQUENCE
  Synthetic Construct
TKGHAK

SEQ ID NO: 18990 - protein, 6 aa, ARTIFICIAL SEQUENCE
  Synthetic Construct
TKGHDK

SEQ ID NO: 18991 - protein, 6 aa, ARTIFICIAL SEQUENCE
  Synthetic Construct
TKGHEK

SEQ ID NO: 18992 - protein, 6 aa, ARTIFICIAL SEQUENCE
  Synthetic Construct
TKGHFK

SEQ ID NO: 18993 - protein, 6 aa, ARTIFICIAL SEQUENCE
  Synthetic Construct
TKGHGK

SEQ ID NO: 18994 - protein, 6 aa, ARTIFICIAL SEQUENCE
  Synthetic Construct
TKGHHK

SEQ ID NO: 18995 - protein, 6 aa, ARTIFICIAL SEQUENCE
  Synthetic Construct
TKGHIK

SEQ ID NO: 18996 - protein, 6 aa, ARTIFICIAL SEQUENCE
  Synthetic Construct
TKGHLK

SEQ ID NO: 18997 - protein, 6 aa, ARTIFICIAL SEQUENCE
  Synthetic Construct
TKGHNK

SEQ ID NO: 18998 - protein, 6 aa, ARTIFICIAL SEQUENCE
  Synthetic Construct
TKGHQK

SEQ ID NO: 18999 - protein, 6 aa, ARTIFICIAL SEQUENCE
  Synthetic Construct
TKGHRK

SEQ ID NO: 19000 - protein, 6 aa, ARTIFICIAL SEQUENCE
  Synthetic Construct
TKGHSK

SEQ ID NO: 19001 - protein, 6 aa, ARTIFICIAL SEQUENCE
  Synthetic Construct
TKGHTK

SEQ ID NO: 19002 - protein, 6 aa, ARTIFICIAL SEQUENCE
  Synthetic Construct
TKGHYK

SEQ ID NO: 19003 - protein, 6 aa, ARTIFICIAL SEQUENCE
  Synthetic Construct
TKGIAK

SEQ ID NO: 19004 - protein, 6 aa, ARTIFICIAL SEQUENCE
  Synthetic Construct
TKGIDK

SEQ ID NO: 19005 - protein, 6 aa, ARTIFICIAL SEQUENCE
  Synthetic Construct
TKGIEK

SEQ ID NO: 19006 - protein, 6 aa, ARTIFICIAL SEQUENCE
  Synthetic Construct
TKGIFK

SEQ ID NO: 19007 - protein, 6 aa, ARTIFICIAL SEQUENCE
  Synthetic Construct
TKGIGK

SEQ ID NO: 19008 - protein, 6 aa, ARTIFICIAL SEQUENCE
  Synthetic Construct
TKGIHK

SEQ ID NO: 19009 - protein, 6 aa, ARTIFICIAL SEQUENCE
  Synthetic Construct
TKGIIK

SEQ ID NO: 19010 - protein, 6 aa, ARTIFICIAL SEQUENCE
  Synthetic Construct
TKGILK

SEQ ID NO: 19011 - protein, 6 aa, ARTIFICIAL SEQUENCE
  Synthetic Construct
TKGINK

SEQ ID NO: 19012 - protein, 6 aa, ARTIFICIAL SEQUENCE
  Synthetic Construct
TKGIQK

SEQ ID NO: 19013 - protein, 6 aa, ARTIFICIAL SEQUENCE
  Synthetic Construct
TKGIRK

SEQ ID NO: 19014 - protein, 6 aa, ARTIFICIAL SEQUENCE
  Synthetic Construct
TKGISK

SEQ ID NO: 19015 - protein, 6 aa, ARTIFICIAL SEQUENCE
  Synthetic Construct
TKGITK

SEQ ID NO: 19016 - protein, 6 aa, ARTIFICIAL SEQUENCE
  Synthetic Construct
TKGIYK

SEQ ID NO: 19017 - protein, 6 aa, ARTIFICIAL SEQUENCE
  Synthetic Construct
TKGLAK

SEQ ID NO: 19018 - protein, 6 aa, ARTIFICIAL SEQUENCE
  Synthetic Construct
TKGLDK

SEQ ID NO: 19019 - protein, 6 aa, ARTIFICIAL SEQUENCE
  Synthetic Construct
TKGLEK

SEQ ID NO: 19020 - protein, 6 aa, ARTIFICIAL SEQUENCE
  Synthetic Construct
TKGLFK

SEQ ID NO: 19021 - protein, 6 aa, ARTIFICIAL SEQUENCE
  Synthetic Construct
TKGLGK

SEQ ID NO: 19022 - protein, 6 aa, ARTIFICIAL SEQUENCE
  Synthetic Construct
TKGLHK

SEQ ID NO: 19023 - protein, 6 aa, ARTIFICIAL SEQUENCE
  Synthetic Construct
TKGLIK

SEQ ID NO: 19024 - protein, 6 aa, ARTIFICIAL SEQUENCE
  Synthetic Construct
TKGLLK

SEQ ID NO: 19025 - protein, 6 aa, ARTIFICIAL SEQUENCE
  Synthetic Construct
TKGLNK

SEQ ID NO: 19026 - protein, 6 aa, ARTIFICIAL SEQUENCE
  Synthetic Construct
TKGLQK

SEQ ID NO: 19027 - protein, 6 aa, ARTIFICIAL SEQUENCE
  Synthetic Construct
TKGLRK

SEQ ID NO: 19028 - protein, 6 aa, ARTIFICIAL SEQUENCE
  Synthetic Construct
TKGLSK

SEQ ID NO: 19029 - protein, 6 aa, ARTIFICIAL SEQUENCE
  Synthetic Construct
TKGLTK

SEQ ID NO: 19030 - protein, 6 aa, ARTIFICIAL SEQUENCE
  Synthetic Construct
TKGLYK

SEQ ID NO: 19031 - protein, 6 aa, ARTIFICIAL SEQUENCE
  Synthetic Construct
TKGNAK

SEQ ID NO: 19032 - protein, 6 aa, ARTIFICIAL SEQUENCE
  Synthetic Construct
TKGNDK

SEQ ID NO: 19033 - protein, 6 aa, ARTIFICIAL SEQUENCE
  Synthetic Construct
TKGNEK

SEQ ID NO: 19034 - protein, 6 aa, ARTIFICIAL SEQUENCE
  Synthetic Construct
TKGNFK

SEQ ID NO: 19035 - protein, 6 aa, ARTIFICIAL SEQUENCE
  Synthetic Construct
TKGNGK

SEQ ID NO: 19036 - protein, 6 aa, ARTIFICIAL SEQUENCE
  Synthetic Construct
TKGNHK

SEQ ID NO: 19037 - protein, 6 aa, ARTIFICIAL SEQUENCE
  Synthetic Construct
TKGNIK

SEQ ID NO: 19038 - protein, 6 aa, ARTIFICIAL SEQUENCE
  Synthetic Construct
TKGNLK

SEQ ID NO: 19039 - protein, 6 aa, ARTIFICIAL SEQUENCE
  Synthetic Construct
TKGNNK

SEQ ID NO: 19040 - protein, 6 aa, ARTIFICIAL SEQUENCE
  Synthetic Construct
TKGNQK

SEQ ID NO: 19041 - protein, 6 aa, ARTIFICIAL SEQUENCE
  Synthetic Construct
TKGNRK

SEQ ID NO: 19042 - protein, 6 aa, ARTIFICIAL SEQUENCE
  Synthetic Construct
TKGNSK

SEQ ID NO: 19043 - protein, 6 aa, ARTIFICIAL SEQUENCE
  Synthetic Construct
TKGNTK

SEQ ID NO: 19044 - protein, 6 aa, ARTIFICIAL SEQUENCE
  Synthetic Construct
TKGNYK

SEQ ID NO: 19045 - protein, 6 aa, ARTIFICIAL SEQUENCE
  Synthetic Construct
TKGQAK

SEQ ID NO: 19046 - protein, 6 aa, ARTIFICIAL SEQUENCE
  Synthetic Construct
TKGQDK

SEQ ID NO: 19047 - protein, 6 aa, ARTIFICIAL SEQUENCE
  Synthetic Construct
TKGQEK

SEQ ID NO: 19048 - protein, 6 aa, ARTIFICIAL SEQUENCE
  Synthetic Construct
TKGQFK

SEQ ID NO: 19049 - protein, 6 aa, ARTIFICIAL SEQUENCE
  Synthetic Construct
TKGQGK

SEQ ID NO: 19050 - protein, 6 aa, ARTIFICIAL SEQUENCE
  Synthetic Construct
TKGQHK

SEQ ID NO: 19051 - protein, 6 aa, ARTIFICIAL SEQUENCE
  Synthetic Construct
TKGQIK

SEQ ID NO: 19052 - protein, 6 aa, ARTIFICIAL SEQUENCE
  Synthetic Construct
TKGQLK

SEQ ID NO: 19053 - protein, 6 aa, ARTIFICIAL SEQUENCE
  Synthetic Construct
TKGQNK

SEQ ID NO: 19054 - protein, 6 aa, ARTIFICIAL SEQUENCE
  Synthetic Construct
TKGQQK

SEQ ID NO: 19055 - protein, 6 aa, ARTIFICIAL SEQUENCE
  Synthetic Construct
TKGQRK

SEQ ID NO: 19056 - protein, 6 aa, ARTIFICIAL SEQUENCE
  Synthetic Construct
TKGQSK

SEQ ID NO: 19057 - protein, 6 aa, ARTIFICIAL SEQUENCE
  Synthetic Construct
TKGQTK

SEQ ID NO: 19058 - protein, 6 aa, ARTIFICIAL SEQUENCE
  Synthetic Construct
TKGQYK

SEQ ID NO: 19059 - protein, 6 aa, ARTIFICIAL SEQUENCE
  Synthetic Construct
TKGRAK

SEQ ID NO: 19060 - protein, 6 aa, ARTIFICIAL SEQUENCE
  Synthetic Construct
TKGRDK

SEQ ID NO: 19061 - protein, 6 aa, ARTIFICIAL SEQUENCE
  Synthetic Construct
TKGREK

SEQ ID NO: 19062 - protein, 6 aa, ARTIFICIAL SEQUENCE
  Synthetic Construct
TKGRFK

SEQ ID NO: 19063 - protein, 6 aa, ARTIFICIAL SEQUENCE
  Synthetic Construct
TKGRGK

SEQ ID NO: 19064 - protein, 6 aa, ARTIFICIAL SEQUENCE
  Synthetic Construct
TKGRHK

SEQ ID NO: 19065 - protein, 6 aa, ARTIFICIAL SEQUENCE
  Synthetic Construct
TKGRIK

SEQ ID NO: 19066 - protein, 6 aa, ARTIFICIAL SEQUENCE
  Synthetic Construct
TKGRLK

SEQ ID NO: 19067 - protein, 6 aa, ARTIFICIAL SEQUENCE
  Synthetic Construct
TKGRNK

SEQ ID NO: 19068 - protein, 6 aa, ARTIFICIAL SEQUENCE
  Synthetic Construct
TKGRQK

SEQ ID NO: 19069 - protein, 6 aa, ARTIFICIAL SEQUENCE
  Synthetic Construct
TKGRRK

SEQ ID NO: 19070 - protein, 6 aa, ARTIFICIAL SEQUENCE
  Synthetic Construct
TKGRSK

SEQ ID NO: 19071 - protein, 6 aa, ARTIFICIAL SEQUENCE
  Synthetic Construct
TKGRTK

SEQ ID NO: 19072 - protein, 6 aa, ARTIFICIAL SEQUENCE
  Synthetic Construct
TKGRYK

SEQ ID NO: 19073 - protein, 6 aa, ARTIFICIAL SEQUENCE
  Synthetic Construct
TKGSAK

SEQ ID NO: 19074 - protein, 6 aa, ARTIFICIAL SEQUENCE
  Synthetic Construct
TKGSDK

SEQ ID NO: 19075 - protein, 6 aa, ARTIFICIAL SEQUENCE
  Synthetic Construct
TKGSEK

SEQ ID NO: 19076 - protein, 6 aa, ARTIFICIAL SEQUENCE
  Synthetic Construct
TKGSFK

SEQ ID NO: 19077 - protein, 6 aa, ARTIFICIAL SEQUENCE
  Synthetic Construct
TKGSGK

SEQ ID NO: 19078 - protein, 6 aa, ARTIFICIAL SEQUENCE
  Synthetic Construct
TKGSHK

SEQ ID NO: 19079 - protein, 6 aa, ARTIFICIAL SEQUENCE
  Synthetic Construct
TKGSIK

SEQ ID NO: 19080 - protein, 6 aa, ARTIFICIAL SEQUENCE
  Synthetic Construct
TKGSLK

SEQ ID NO: 19081 - protein, 6 aa, ARTIFICIAL SEQUENCE
  Synthetic Construct
TKGSNK

SEQ ID NO: 19082 - protein, 6 aa, ARTIFICIAL SEQUENCE
  Synthetic Construct
TKGSQK

SEQ ID NO: 19083 - protein, 6 aa, ARTIFICIAL SEQUENCE
  Synthetic Construct
TKGSRK

SEQ ID NO: 19084 - protein, 6 aa, ARTIFICIAL SEQUENCE
  Synthetic Construct
TKGSSK

SEQ ID NO: 19085 - protein, 6 aa, ARTIFICIAL SEQUENCE
  Synthetic Construct
TKGSTK

SEQ ID NO: 19086 - protein, 6 aa, ARTIFICIAL SEQUENCE
  Synthetic Construct
TKGSYK

SEQ ID NO: 19087 - protein, 6 aa, ARTIFICIAL SEQUENCE
  Synthetic Construct
TKGTAK

SEQ ID NO: 19088 - protein, 6 aa, ARTIFICIAL SEQUENCE
  Synthetic Construct
TKGTDK

SEQ ID NO: 19089 - protein, 6 aa, ARTIFICIAL SEQUENCE
  Synthetic Construct
TKGTEK

SEQ ID NO: 19090 - protein, 6 aa, ARTIFICIAL SEQUENCE
  Synthetic Construct
TKGTFK

SEQ ID NO: 19091 - protein, 6 aa, ARTIFICIAL SEQUENCE
  Synthetic Construct
TKGTGK

SEQ ID NO: 19092 - protein, 6 aa, ARTIFICIAL SEQUENCE
  Synthetic Construct
TKGTHK

SEQ ID NO: 19093 - protein, 6 aa, ARTIFICIAL SEQUENCE
  Synthetic Construct
TKGTIK

SEQ ID NO: 19094 - protein, 6 aa, ARTIFICIAL SEQUENCE
  Synthetic Construct
TKGTLK

SEQ ID NO: 19095 - protein, 6 aa, ARTIFICIAL SEQUENCE
  Synthetic Construct
TKGTNK

SEQ ID NO: 19096 - protein, 6 aa, ARTIFICIAL SEQUENCE
  Synthetic Construct
TKGTQK

SEQ ID NO: 19097 - protein, 6 aa, ARTIFICIAL SEQUENCE
  Synthetic Construct
TKGTRK

SEQ ID NO: 19098 - protein, 6 aa, ARTIFICIAL SEQUENCE
  Synthetic Construct
TKGTSK

SEQ ID NO: 19099 - protein, 6 aa, ARTIFICIAL SEQUENCE
  Synthetic Construct
TKGTTK

SEQ ID NO: 19100 - protein, 6 aa, ARTIFICIAL SEQUENCE
  Synthetic Construct
TKGTYK

SEQ ID NO: 19101 - protein, 6 aa, ARTIFICIAL SEQUENCE
  Synthetic Construct
TKGYAK

SEQ ID NO: 19102 - protein, 6 aa, ARTIFICIAL SEQUENCE
  Synthetic Construct
TKGYDK

SEQ ID NO: 19103 - protein, 6 aa, ARTIFICIAL SEQUENCE
  Synthetic Construct
TKGYEK

SEQ ID NO: 19104 - protein, 6 aa, ARTIFICIAL SEQUENCE
  Synthetic Construct
TKGYFK

SEQ ID NO: 19105 - protein, 6 aa, ARTIFICIAL SEQUENCE
  Synthetic Construct
TKGYGK

SEQ ID NO: 19106 - protein, 6 aa, ARTIFICIAL SEQUENCE
  Synthetic Construct
TKGYHK

SEQ ID NO: 19107 - protein, 6 aa, ARTIFICIAL SEQUENCE
  Synthetic Construct
TKGYIK

SEQ ID NO: 19108 - protein, 6 aa, ARTIFICIAL SEQUENCE
  Synthetic Construct
TKGYLK

SEQ ID NO: 19109 - protein, 6 aa, ARTIFICIAL SEQUENCE
  Synthetic Construct
TKGYNK

SEQ ID NO: 19110 - protein, 6 aa, ARTIFICIAL SEQUENCE
  Synthetic Construct
TKGYQK

SEQ ID NO: 19111 - protein, 6 aa, ARTIFICIAL SEQUENCE
  Synthetic Construct
TKGYRK

SEQ ID NO: 19112 - protein, 6 aa, ARTIFICIAL SEQUENCE
  Synthetic Construct
TKGYSK

SEQ ID NO: 19113 - protein, 6 aa, ARTIFICIAL SEQUENCE
  Synthetic Construct
TKGYTK

SEQ ID NO: 19114 - protein, 6 aa, ARTIFICIAL SEQUENCE
  Synthetic Construct
TKGYYK

SEQ ID NO: 19115 - protein, 6 aa, ARTIFICIAL SEQUENCE
  Synthetic Construct
TKHAAK

SEQ ID NO: 19116 - protein, 6 aa, ARTIFICIAL SEQUENCE
  Synthetic Construct
TKHADK

SEQ ID NO: 19117 - protein, 6 aa, ARTIFICIAL SEQUENCE
  Synthetic Construct
TKHAEK

SEQ ID NO: 19118 - protein, 6 aa, ARTIFICIAL SEQUENCE
  Synthetic Construct
TKHAFK

SEQ ID NO: 19119 - protein, 6 aa, ARTIFICIAL SEQUENCE
  Synthetic Construct
TKHAGK

SEQ ID NO: 19120 - protein, 6 aa, ARTIFICIAL SEQUENCE
  Synthetic Construct
TKHAHK

SEQ ID NO: 19121 - protein, 6 aa, ARTIFICIAL SEQUENCE
  Synthetic Construct
TKHAIK

SEQ ID NO: 19122 - protein, 6 aa, ARTIFICIAL SEQUENCE
  Synthetic Construct
TKHALK

SEQ ID NO: 19123 - protein, 6 aa, ARTIFICIAL SEQUENCE
  Synthetic Construct
TKHANK

SEQ ID NO: 19124 - protein, 6 aa, ARTIFICIAL SEQUENCE
  Synthetic Construct
TKHAQK

SEQ ID NO: 19125 - protein, 6 aa, ARTIFICIAL SEQUENCE
  Synthetic Construct
TKHARK

SEQ ID NO: 19126 - protein, 6 aa, ARTIFICIAL SEQUENCE
  Synthetic Construct
TKHASK

SEQ ID NO: 19127 - protein, 6 aa, ARTIFICIAL SEQUENCE
  Synthetic Construct
TKHATK

SEQ ID NO: 19128 - protein, 6 aa, ARTIFICIAL SEQUENCE
  Synthetic Construct
TKHAYK

SEQ ID NO: 19129 - protein, 6 aa, ARTIFICIAL SEQUENCE
  Synthetic Construct
TKHDAK

SEQ ID NO: 19130 - protein, 6 aa, ARTIFICIAL SEQUENCE
  Synthetic Construct
TKHDDK

SEQ ID NO: 19131 - protein, 6 aa, ARTIFICIAL SEQUENCE
  Synthetic Construct
TKHDEK

SEQ ID NO: 19132 - protein, 6 aa, ARTIFICIAL SEQUENCE
  Synthetic Construct
TKHDFK

SEQ ID NO: 19133 - protein, 6 aa, ARTIFICIAL SEQUENCE
  Synthetic Construct
TKHDGK

SEQ ID NO: 19134 - protein, 6 aa, ARTIFICIAL SEQUENCE
  Synthetic Construct
TKHDHK

SEQ ID NO: 19135 - protein, 6 aa, ARTIFICIAL SEQUENCE
  Synthetic Construct
TKHDIK

SEQ ID NO: 19136 - protein, 6 aa, ARTIFICIAL SEQUENCE
  Synthetic Construct
TKHDLK

SEQ ID NO: 19137 - protein, 6 aa, ARTIFICIAL SEQUENCE
  Synthetic Construct
TKHDNK

SEQ ID NO: 19138 - protein, 6 aa, ARTIFICIAL SEQUENCE
  Synthetic Construct
TKHDQK

SEQ ID NO: 19139 - protein, 6 aa, ARTIFICIAL SEQUENCE
  Synthetic Construct
TKHDRK

SEQ ID NO: 19140 - protein, 6 aa, ARTIFICIAL SEQUENCE
  Synthetic Construct
TKHDSK

SEQ ID NO: 19141 - protein, 6 aa, ARTIFICIAL SEQUENCE
  Synthetic Construct
TKHDTK

SEQ ID NO: 19142 - protein, 6 aa, ARTIFICIAL SEQUENCE
  Synthetic Construct
TKHDYK

SEQ ID NO: 19143 - protein, 6 aa, ARTIFICIAL SEQUENCE
  Synthetic Construct
TKHEAK

SEQ ID NO: 19144 - protein, 6 aa, ARTIFICIAL SEQUENCE
  Synthetic Construct
TKHEDK

SEQ ID NO: 19145 - protein, 6 aa, ARTIFICIAL SEQUENCE
  Synthetic Construct
TKHEEK

SEQ ID NO: 19146 - protein, 6 aa, ARTIFICIAL SEQUENCE
  Synthetic Construct
TKHEFK

SEQ ID NO: 19147 - protein, 6 aa, ARTIFICIAL SEQUENCE
  Synthetic Construct
TKHEGK

SEQ ID NO: 19148 - protein, 6 aa, ARTIFICIAL SEQUENCE
  Synthetic Construct
TKHEHK

SEQ ID NO: 19149 - protein, 6 aa, ARTIFICIAL SEQUENCE
  Synthetic Construct
TKHEIK

SEQ ID NO: 19150 - protein, 6 aa, ARTIFICIAL SEQUENCE
  Synthetic Construct
TKHELK

SEQ ID NO: 19151 - protein, 6 aa, ARTIFICIAL SEQUENCE
  Synthetic Construct
TKHENK

SEQ ID NO: 19152 - protein, 6 aa, ARTIFICIAL SEQUENCE
  Synthetic Construct
TKHEQK

SEQ ID NO: 19153 - protein, 6 aa, ARTIFICIAL SEQUENCE
  Synthetic Construct
TKHERK

SEQ ID NO: 19154 - protein, 6 aa, ARTIFICIAL SEQUENCE
  Synthetic Construct
TKHESK

SEQ ID NO: 19155 - protein, 6 aa, ARTIFICIAL SEQUENCE
  Synthetic Construct
TKHETK

SEQ ID NO: 19156 - protein, 6 aa, ARTIFICIAL SEQUENCE
  Synthetic Construct
TKHEYK

SEQ ID NO: 19157 - protein, 6 aa, ARTIFICIAL SEQUENCE
  Synthetic Construct
TKHFAK

SEQ ID NO: 19158 - protein, 6 aa, ARTIFICIAL SEQUENCE
  Synthetic Construct
TKHFDK

SEQ ID NO: 19159 - protein, 6 aa, ARTIFICIAL SEQUENCE
  Synthetic Construct
TKHFEK

SEQ ID NO: 19160 - protein, 6 aa, ARTIFICIAL SEQUENCE
  Synthetic Construct
TKHFFK

SEQ ID NO: 19161 - protein, 6 aa, ARTIFICIAL SEQUENCE
  Synthetic Construct
TKHFGK

SEQ ID NO: 19162 - protein, 6 aa, ARTIFICIAL SEQUENCE
  Synthetic Construct
TKHFHK

SEQ ID NO: 19163 - protein, 6 aa, ARTIFICIAL SEQUENCE
  Synthetic Construct
TKHFIK

SEQ ID NO: 19164 - protein, 6 aa, ARTIFICIAL SEQUENCE
  Synthetic Construct
TKHFLK

SEQ ID NO: 19165 - protein, 6 aa, ARTIFICIAL SEQUENCE
  Synthetic Construct
TKHFNK

SEQ ID NO: 19166 - protein, 6 aa, ARTIFICIAL SEQUENCE
  Synthetic Construct
TKHFQK

SEQ ID NO: 19167 - protein, 6 aa, ARTIFICIAL SEQUENCE
  Synthetic Construct
TKHFRK

SEQ ID NO: 19168 - protein, 6 aa, ARTIFICIAL SEQUENCE
  Synthetic Construct
TKHFSK

SEQ ID NO: 19169 - protein, 6 aa, ARTIFICIAL SEQUENCE
  Synthetic Construct
TKHFTK

SEQ ID NO: 19170 - protein, 6 aa, ARTIFICIAL SEQUENCE
  Synthetic Construct
TKHFYK

SEQ ID NO: 19171 - protein, 6 aa, ARTIFICIAL SEQUENCE
  Synthetic Construct
TKHGAK

SEQ ID NO: 19172 - protein, 6 aa, ARTIFICIAL SEQUENCE
  Synthetic Construct
TKHGDK

SEQ ID NO: 19173 - protein, 6 aa, ARTIFICIAL SEQUENCE
  Synthetic Construct
TKHGEK

SEQ ID NO: 19174 - protein, 6 aa, ARTIFICIAL SEQUENCE
  Synthetic Construct
TKHGFK

SEQ ID NO: 19175 - protein, 6 aa, ARTIFICIAL SEQUENCE
  Synthetic Construct
TKHGGK

SEQ ID NO: 19176 - protein, 6 aa, ARTIFICIAL SEQUENCE
  Synthetic Construct
TKHGHK

SEQ ID NO: 19177 - protein, 6 aa, ARTIFICIAL SEQUENCE
  Synthetic Construct
TKHGIK

SEQ ID NO: 19178 - protein, 6 aa, ARTIFICIAL SEQUENCE
  Synthetic Construct
TKHGLK

SEQ ID NO: 19179 - protein, 6 aa, ARTIFICIAL SEQUENCE
  Synthetic Construct
TKHGNK

SEQ ID NO: 19180 - protein, 6 aa, ARTIFICIAL SEQUENCE
  Synthetic Construct
TKHGQK

SEQ ID NO: 19181 - protein, 6 aa, ARTIFICIAL SEQUENCE
  Synthetic Construct
TKHGRK

SEQ ID NO: 19182 - protein, 6 aa, ARTIFICIAL SEQUENCE
  Synthetic Construct
TKHGSK

SEQ ID NO: 19183 - protein, 6 aa, ARTIFICIAL SEQUENCE
  Synthetic Construct
TKHGTK

SEQ ID NO: 19184 - protein, 6 aa, ARTIFICIAL SEQUENCE
  Synthetic Construct
TKHGYK

SEQ ID NO: 19185 - protein, 6 aa, ARTIFICIAL SEQUENCE
  Synthetic Construct
TKHHAK

SEQ ID NO: 19186 - protein, 6 aa, ARTIFICIAL SEQUENCE
  Synthetic Construct
TKHHDK

SEQ ID NO: 19187 - protein, 6 aa, ARTIFICIAL SEQUENCE
  Synthetic Construct
TKHHEK

SEQ ID NO: 19188 - protein, 6 aa, ARTIFICIAL SEQUENCE
  Synthetic Construct
TKHHFK

SEQ ID NO: 19189 - protein, 6 aa, ARTIFICIAL SEQUENCE
  Synthetic Construct
TKHHGK

SEQ ID NO: 19190 - protein, 6 aa, ARTIFICIAL SEQUENCE
  Synthetic Construct
TKHHHK

SEQ ID NO: 19191 - protein, 6 aa, ARTIFICIAL SEQUENCE
  Synthetic Construct
TKHHIK

SEQ ID NO: 19192 - protein, 6 aa, ARTIFICIAL SEQUENCE
  Synthetic Construct
TKHHLK

SEQ ID NO: 19193 - protein, 6 aa, ARTIFICIAL SEQUENCE
  Synthetic Construct
TKHHNK

SEQ ID NO: 19194 - protein, 6 aa, ARTIFICIAL SEQUENCE
  Synthetic Construct
TKHHQK

SEQ ID NO: 19195 - protein, 6 aa, ARTIFICIAL SEQUENCE
  Synthetic Construct
TKHHRK

SEQ ID NO: 19196 - protein, 6 aa, ARTIFICIAL SEQUENCE
  Synthetic Construct
TKHHSK

SEQ ID NO: 19197 - protein, 6 aa, ARTIFICIAL SEQUENCE
  Synthetic Construct
TKHHTK

SEQ ID NO: 19198 - protein, 6 aa, ARTIFICIAL SEQUENCE
  Synthetic Construct
TKHHYK

SEQ ID NO: 19199 - protein, 6 aa, ARTIFICIAL SEQUENCE
  Synthetic Construct
TKHIAK

SEQ ID NO: 19200 - protein, 6 aa, ARTIFICIAL SEQUENCE
  Synthetic Construct
TKHIDK

SEQ ID NO: 19201 - protein, 6 aa, ARTIFICIAL SEQUENCE
  Synthetic Construct
TKHIEK

SEQ ID NO: 19202 - protein, 6 aa, ARTIFICIAL SEQUENCE
  Synthetic Construct
TKHIFK

SEQ ID NO: 19203 - protein, 6 aa, ARTIFICIAL SEQUENCE
  Synthetic Construct
TKHIGK

SEQ ID NO: 19204 - protein, 6 aa, ARTIFICIAL SEQUENCE
  Synthetic Construct
TKHIHK

SEQ ID NO: 19205 - protein, 6 aa, ARTIFICIAL SEQUENCE
  Synthetic Construct
TKHIIK

SEQ ID NO: 19206 - protein, 6 aa, ARTIFICIAL SEQUENCE
  Synthetic Construct
TKHILK

SEQ ID NO: 19207 - protein, 6 aa, ARTIFICIAL SEQUENCE
  Synthetic Construct
TKHINK

SEQ ID NO: 19208 - protein, 6 aa, ARTIFICIAL SEQUENCE
  Synthetic Construct
TKHIQK

SEQ ID NO: 19209 - protein, 6 aa, ARTIFICIAL SEQUENCE
  Synthetic Construct
TKHIRK

SEQ ID NO: 19210 - protein, 6 aa, ARTIFICIAL SEQUENCE
  Synthetic Construct
TKHISK

SEQ ID NO: 19211 - protein, 6 aa, ARTIFICIAL SEQUENCE
  Synthetic Construct
TKHITK

SEQ ID NO: 19212 - protein, 6 aa, ARTIFICIAL SEQUENCE
  Synthetic Construct
TKHIYK

SEQ ID NO: 19213 - protein, 6 aa, ARTIFICIAL SEQUENCE
  Synthetic Construct
TKHLAK

SEQ ID NO: 19214 - protein, 6 aa, ARTIFICIAL SEQUENCE
  Synthetic Construct
TKHLDK

SEQ ID NO: 19215 - protein, 6 aa, ARTIFICIAL SEQUENCE
  Synthetic Construct
TKHLEK

SEQ ID NO: 19216 - protein, 6 aa, ARTIFICIAL SEQUENCE
  Synthetic Construct
TKHLFK

SEQ ID NO: 19217 - protein, 6 aa, ARTIFICIAL SEQUENCE
  Synthetic Construct
TKHLGK

SEQ ID NO: 19218 - protein, 6 aa, ARTIFICIAL SEQUENCE
  Synthetic Construct
TKHLHK

SEQ ID NO: 19219 - protein, 6 aa, ARTIFICIAL SEQUENCE
  Synthetic Construct
TKHLIK

SEQ ID NO: 19220 - protein, 6 aa, ARTIFICIAL SEQUENCE
  Synthetic Construct
TKHLLK

SEQ ID NO: 19221 - protein, 6 aa, ARTIFICIAL SEQUENCE
  Synthetic Construct
TKHLNK

SEQ ID NO: 19222 - protein, 6 aa, ARTIFICIAL SEQUENCE
  Synthetic Construct
TKHLQK

SEQ ID NO: 19223 - protein, 6 aa, ARTIFICIAL SEQUENCE
  Synthetic Construct
TKHLRK

SEQ ID NO: 19224 - protein, 6 aa, ARTIFICIAL SEQUENCE
  Synthetic Construct
TKHLSK

SEQ ID NO: 19225 - protein, 6 aa, ARTIFICIAL SEQUENCE
  Synthetic Construct
TKHLTK

SEQ ID NO: 19226 - protein, 6 aa, ARTIFICIAL SEQUENCE
  Synthetic Construct
TKHLYK

SEQ ID NO: 19227 - protein, 6 aa, ARTIFICIAL SEQUENCE
  Synthetic Construct
TKHNAK

SEQ ID NO: 19228 - protein, 6 aa, ARTIFICIAL SEQUENCE
  Synthetic Construct
TKHNDK

SEQ ID NO: 19229 - protein, 6 aa, ARTIFICIAL SEQUENCE
  Synthetic Construct
TKHNEK

SEQ ID NO: 19230 - protein, 6 aa, ARTIFICIAL SEQUENCE
  Synthetic Construct
TKHNFK

SEQ ID NO: 19231 - protein, 6 aa, ARTIFICIAL SEQUENCE
  Synthetic Construct
TKHNGK

SEQ ID NO: 19232 - protein, 6 aa, ARTIFICIAL SEQUENCE
  Synthetic Construct
TKHNHK

SEQ ID NO: 19233 - protein, 6 aa, ARTIFICIAL SEQUENCE
  Synthetic Construct
TKHNIK

SEQ ID NO: 19234 - protein, 6 aa, ARTIFICIAL SEQUENCE
  Synthetic Construct
TKHNLK

SEQ ID NO: 19235 - protein, 6 aa, ARTIFICIAL SEQUENCE
  Synthetic Construct
TKHNNK

SEQ ID NO: 19236 - protein, 6 aa, ARTIFICIAL SEQUENCE
  Synthetic Construct
TKHNQK

SEQ ID NO: 19237 - protein, 6 aa, ARTIFICIAL SEQUENCE
  Synthetic Construct
TKHNRK

SEQ ID NO: 19238 - protein, 6 aa, ARTIFICIAL SEQUENCE
  Synthetic Construct
TKHNSK

SEQ ID NO: 19239 - protein, 6 aa, ARTIFICIAL SEQUENCE
  Synthetic Construct
TKHNTK

SEQ ID NO: 19240 - protein, 6 aa, ARTIFICIAL SEQUENCE
  Synthetic Construct
TKHNYK

SEQ ID NO: 19241 - protein, 6 aa, ARTIFICIAL SEQUENCE
  Synthetic Construct
TKHQAK

SEQ ID NO: 19242 - protein, 6 aa, ARTIFICIAL SEQUENCE
  Synthetic Construct
TKHQDK

SEQ ID NO: 19243 - protein, 6 aa, ARTIFICIAL SEQUENCE
  Synthetic Construct
TKHQEK

SEQ ID NO: 19244 - protein, 6 aa, ARTIFICIAL SEQUENCE
  Synthetic Construct
TKHQFK

SEQ ID NO: 19245 - protein, 6 aa, ARTIFICIAL SEQUENCE
  Synthetic Construct
TKHQGK

SEQ ID NO: 19246 - protein, 6 aa, ARTIFICIAL SEQUENCE
  Synthetic Construct
TKHQHK

SEQ ID NO: 19247 - protein, 6 aa, ARTIFICIAL SEQUENCE
  Synthetic Construct
TKHQIK

SEQ ID NO: 19248 - protein, 6 aa, ARTIFICIAL SEQUENCE
  Synthetic Construct
TKHQLK

SEQ ID NO: 19249 - protein, 6 aa, ARTIFICIAL SEQUENCE
  Synthetic Construct
TKHQNK

SEQ ID NO: 19250 - protein, 6 aa, ARTIFICIAL SEQUENCE
  Synthetic Construct
TKHQQK

SEQ ID NO: 19251 - protein, 6 aa, ARTIFICIAL SEQUENCE
  Synthetic Construct
TKHQRK

SEQ ID NO: 19252 - protein, 6 aa, ARTIFICIAL SEQUENCE
  Synthetic Construct
TKHQSK

SEQ ID NO: 19253 - protein, 6 aa, ARTIFICIAL SEQUENCE
  Synthetic Construct
TKHQTK

SEQ ID NO: 19254 - protein, 6 aa, ARTIFICIAL SEQUENCE
  Synthetic Construct
TKHQYK

SEQ ID NO: 19255 - protein, 6 aa, ARTIFICIAL SEQUENCE
  Synthetic Construct
TKHRAK

SEQ ID NO: 19256 - protein, 6 aa, ARTIFICIAL SEQUENCE
  Synthetic Construct
TKHRDK

SEQ ID NO: 19257 - protein, 6 aa, ARTIFICIAL SEQUENCE
  Synthetic Construct
TKHREK

SEQ ID NO: 19258 - protein, 6 aa, ARTIFICIAL SEQUENCE
  Synthetic Construct
TKHRFK

SEQ ID NO: 19259 - protein, 6 aa, ARTIFICIAL SEQUENCE
  Synthetic Construct
TKHRGK

SEQ ID NO: 19260 - protein, 6 aa, ARTIFICIAL SEQUENCE
  Synthetic Construct
TKHRHK

SEQ ID NO: 19261 - protein, 6 aa, ARTIFICIAL SEQUENCE
  Synthetic Construct
TKHRIK

SEQ ID NO: 19262 - protein, 6 aa, ARTIFICIAL SEQUENCE
  Synthetic Construct
TKHRLK

SEQ ID NO: 19263 - protein, 6 aa, ARTIFICIAL SEQUENCE
  Synthetic Construct
TKHRNK

SEQ ID NO: 19264 - protein, 6 aa, ARTIFICIAL SEQUENCE
  Synthetic Construct
TKHRQK

SEQ ID NO: 19265 - protein, 6 aa, ARTIFICIAL SEQUENCE
  Synthetic Construct
TKHRRK

SEQ ID NO: 19266 - protein, 6 aa, ARTIFICIAL SEQUENCE
  Synthetic Construct
TKHRSK

SEQ ID NO: 19267 - protein, 6 aa, ARTIFICIAL SEQUENCE
  Synthetic Construct
TKHRTK

SEQ ID NO: 19268 - protein, 6 aa, ARTIFICIAL SEQUENCE
  Synthetic Construct
TKHRYK

SEQ ID NO: 19269 - protein, 6 aa, ARTIFICIAL SEQUENCE
  Synthetic Construct
TKHSAK

SEQ ID NO: 19270 - protein, 6 aa, ARTIFICIAL SEQUENCE
  Synthetic Construct
TKHSDK

SEQ ID NO: 19271 - protein, 6 aa, ARTIFICIAL SEQUENCE
  Synthetic Construct
TKHSEK

SEQ ID NO: 19272 - protein, 6 aa, ARTIFICIAL SEQUENCE
  Synthetic Construct
TKHSFK

SEQ ID NO: 19273 - protein, 6 aa, ARTIFICIAL SEQUENCE
  Synthetic Construct
TKHSGK

SEQ ID NO: 19274 - protein, 6 aa, ARTIFICIAL SEQUENCE
  Synthetic Construct
TKHSHK

SEQ ID NO: 19275 - protein, 6 aa, ARTIFICIAL SEQUENCE
  Synthetic Construct
TKHSIK

SEQ ID NO: 19276 - protein, 6 aa, ARTIFICIAL SEQUENCE
  Synthetic Construct
TKHSLK

SEQ ID NO: 19277 - protein, 6 aa, ARTIFICIAL SEQUENCE
  Synthetic Construct
TKHSNK

SEQ ID NO: 19278 - protein, 6 aa, ARTIFICIAL SEQUENCE
  Synthetic Construct
TKHSQK

SEQ ID NO: 19279 - protein, 6 aa, ARTIFICIAL SEQUENCE
  Synthetic Construct
TKHSRK

SEQ ID NO: 19280 - protein, 6 aa, ARTIFICIAL SEQUENCE
  Synthetic Construct
TKHSSK

SEQ ID NO: 19281 - protein, 6 aa, ARTIFICIAL SEQUENCE
  Synthetic Construct
TKHSTK

SEQ ID NO: 19282 - protein, 6 aa, ARTIFICIAL SEQUENCE
  Synthetic Construct
TKHSYK

SEQ ID NO: 19283 - protein, 6 aa, ARTIFICIAL SEQUENCE
  Synthetic Construct
TKHTAK

SEQ ID NO: 19284 - protein, 6 aa, ARTIFICIAL SEQUENCE
  Synthetic Construct
TKHTDK

SEQ ID NO: 19285 - protein, 6 aa, ARTIFICIAL SEQUENCE
  Synthetic Construct
TKHTEK

SEQ ID NO: 19286 - protein, 6 aa, ARTIFICIAL SEQUENCE
  Synthetic Construct
TKHTFK

SEQ ID NO: 19287 - protein, 6 aa, ARTIFICIAL SEQUENCE
  Synthetic Construct
TKHTGK

SEQ ID NO: 19288 - protein, 6 aa, ARTIFICIAL SEQUENCE
  Synthetic Construct
TKHTHK

SEQ ID NO: 19289 - protein, 6 aa, ARTIFICIAL SEQUENCE
  Synthetic Construct
TKHTIK

SEQ ID NO: 19290 - protein, 6 aa, ARTIFICIAL SEQUENCE
  Synthetic Construct
TKHTLK

SEQ ID NO: 19291 - protein, 6 aa, ARTIFICIAL SEQUENCE
  Synthetic Construct
TKHTNK

SEQ ID NO: 19292 - protein, 6 aa, ARTIFICIAL SEQUENCE
  Synthetic Construct
TKHTQK

SEQ ID NO: 19293 - protein, 6 aa, ARTIFICIAL SEQUENCE
  Synthetic Construct
TKHTRK

SEQ ID NO: 19294 - protein, 6 aa, ARTIFICIAL SEQUENCE
  Synthetic Construct
TKHTSK

SEQ ID NO: 19295 - protein, 6 aa, ARTIFICIAL SEQUENCE
  Synthetic Construct
TKHTTK

SEQ ID NO: 19296 - protein, 6 aa, ARTIFICIAL SEQUENCE
  Synthetic Construct
TKHTYK

SEQ ID NO: 19297 - protein, 6 aa, ARTIFICIAL SEQUENCE
  Synthetic Construct
TKHYAK

SEQ ID NO: 19298 - protein, 6 aa, ARTIFICIAL SEQUENCE
  Synthetic Construct
TKHYDK

SEQ ID NO: 19299 - protein, 6 aa, ARTIFICIAL SEQUENCE
  Synthetic Construct
TKHYEK

SEQ ID NO: 19300 - protein, 6 aa, ARTIFICIAL SEQUENCE
  Synthetic Construct
TKHYFK

SEQ ID NO: 19301 - protein, 6 aa, ARTIFICIAL SEQUENCE
  Synthetic Construct
TKHYGK

SEQ ID NO: 19302 - protein, 6 aa, ARTIFICIAL SEQUENCE
  Synthetic Construct
TKHYHK

SEQ ID NO: 19303 - protein, 6 aa, ARTIFICIAL SEQUENCE
  Synthetic Construct
TKHYIK

SEQ ID NO: 19304 - protein, 6 aa, ARTIFICIAL SEQUENCE
  Synthetic Construct
TKHYLK

SEQ ID NO: 19305 - protein, 6 aa, ARTIFICIAL SEQUENCE
  Synthetic Construct
TKHYNK

SEQ ID NO: 19306 - protein, 6 aa, ARTIFICIAL SEQUENCE
  Synthetic Construct
TKHYQK

SEQ ID NO: 19307 - protein, 6 aa, ARTIFICIAL SEQUENCE
  Synthetic Construct
TKHYRK

SEQ ID NO: 19308 - protein, 6 aa, ARTIFICIAL SEQUENCE
  Synthetic Construct
TKHYSK

SEQ ID NO: 19309 - protein, 6 aa, ARTIFICIAL SEQUENCE
  Synthetic Construct
TKHYTK

SEQ ID NO: 19310 - protein, 6 aa, ARTIFICIAL SEQUENCE
  Synthetic Construct
TKHYYK

SEQ ID NO: 19311 - protein, 6 aa, ARTIFICIAL SEQUENCE
  Synthetic Construct
TKIAAK

SEQ ID NO: 19312 - protein, 6 aa, ARTIFICIAL SEQUENCE
  Synthetic Construct
TKIADK

SEQ ID NO: 19313 - protein, 6 aa, ARTIFICIAL SEQUENCE
  Synthetic Construct
TKIAEK

SEQ ID NO: 19314 - protein, 6 aa, ARTIFICIAL SEQUENCE
  Synthetic Construct
TKIAFK

SEQ ID NO: 19315 - protein, 6 aa, ARTIFICIAL SEQUENCE
  Synthetic Construct
TKIAGK

SEQ ID NO: 19316 - protein, 6 aa, ARTIFICIAL SEQUENCE
  Synthetic Construct
TKIAHK

SEQ ID NO: 19317 - protein, 6 aa, ARTIFICIAL SEQUENCE
  Synthetic Construct
TKIAIK

SEQ ID NO: 19318 - protein, 6 aa, ARTIFICIAL SEQUENCE
  Synthetic Construct
TKIALK

SEQ ID NO: 19319 - protein, 6 aa, ARTIFICIAL SEQUENCE
  Synthetic Construct
TKIANK

SEQ ID NO: 19320 - protein, 6 aa, ARTIFICIAL SEQUENCE
  Synthetic Construct
TKIAQK

SEQ ID NO: 19321 - protein, 6 aa, ARTIFICIAL SEQUENCE
  Synthetic Construct
TKIARK

SEQ ID NO: 19322 - protein, 6 aa, ARTIFICIAL SEQUENCE
  Synthetic Construct
TKIASK

SEQ ID NO: 19323 - protein, 6 aa, ARTIFICIAL SEQUENCE
  Synthetic Construct
TKIATK

SEQ ID NO: 19324 - protein, 6 aa, ARTIFICIAL SEQUENCE
  Synthetic Construct
TKIAYK

SEQ ID NO: 19325 - protein, 6 aa, ARTIFICIAL SEQUENCE
  Synthetic Construct
TKIDAK

SEQ ID NO: 19326 - protein, 6 aa, ARTIFICIAL SEQUENCE
  Synthetic Construct
TKIDDK

SEQ ID NO: 19327 - protein, 6 aa, ARTIFICIAL SEQUENCE
  Synthetic Construct
TKIDEK

SEQ ID NO: 19328 - protein, 6 aa, ARTIFICIAL SEQUENCE
  Synthetic Construct
TKIDFK

SEQ ID NO: 19329 - protein, 6 aa, ARTIFICIAL SEQUENCE
  Synthetic Construct
TKIDGK

SEQ ID NO: 19330 - protein, 6 aa, ARTIFICIAL SEQUENCE
  Synthetic Construct
TKIDHK

SEQ ID NO: 19331 - protein, 6 aa, ARTIFICIAL SEQUENCE
  Synthetic Construct
TKIDIK

SEQ ID NO: 19332 - protein, 6 aa, ARTIFICIAL SEQUENCE
  Synthetic Construct
TKIDLK

SEQ ID NO: 19333 - protein, 6 aa, ARTIFICIAL SEQUENCE
  Synthetic Construct
TKIDNK

SEQ ID NO: 19334 - protein, 6 aa, ARTIFICIAL SEQUENCE
  Synthetic Construct
TKIDQK

SEQ ID NO: 19335 - protein, 6 aa, ARTIFICIAL SEQUENCE
  Synthetic Construct
TKIDRK

SEQ ID NO: 19336 - protein, 6 aa, ARTIFICIAL SEQUENCE
  Synthetic Construct
TKIDSK

SEQ ID NO: 19337 - protein, 6 aa, ARTIFICIAL SEQUENCE
  Synthetic Construct
TKIDTK

SEQ ID NO: 19338 - protein, 6 aa, ARTIFICIAL SEQUENCE
  Synthetic Construct
TKIDYK

SEQ ID NO: 19339 - protein, 6 aa, ARTIFICIAL SEQUENCE
  Synthetic Construct
TKIEAK

SEQ ID NO: 19340 - protein, 6 aa, ARTIFICIAL SEQUENCE
  Synthetic Construct
TKIEDK

SEQ ID NO: 19341 - protein, 6 aa, ARTIFICIAL SEQUENCE
  Synthetic Construct
TKIEEK

SEQ ID NO: 19342 - protein, 6 aa, ARTIFICIAL SEQUENCE
  Synthetic Construct
TKIEFK

SEQ ID NO: 19343 - protein, 6 aa, ARTIFICIAL SEQUENCE
  Synthetic Construct
TKIEGK

SEQ ID NO: 19344 - protein, 6 aa, ARTIFICIAL SEQUENCE
  Synthetic Construct
TKIEHK

SEQ ID NO: 19345 - protein, 6 aa, ARTIFICIAL SEQUENCE
  Synthetic Construct
TKIEIK

SEQ ID NO: 19346 - protein, 6 aa, ARTIFICIAL SEQUENCE
  Synthetic Construct
TKIELK

SEQ ID NO: 19347 - protein, 6 aa, ARTIFICIAL SEQUENCE
  Synthetic Construct
TKIENK

SEQ ID NO: 19348 - protein, 6 aa, ARTIFICIAL SEQUENCE
  Synthetic Construct
TKIEQK

SEQ ID NO: 19349 - protein, 6 aa, ARTIFICIAL SEQUENCE
  Synthetic Construct
TKIERK

SEQ ID NO: 19350 - protein, 6 aa, ARTIFICIAL SEQUENCE
  Synthetic Construct
TKIESK

SEQ ID NO: 19351 - protein, 6 aa, ARTIFICIAL SEQUENCE
  Synthetic Construct
TKIETK

SEQ ID NO: 19352 - protein, 6 aa, ARTIFICIAL SEQUENCE
  Synthetic Construct
TKIEYK

SEQ ID NO: 19353 - protein, 6 aa, ARTIFICIAL SEQUENCE
  Synthetic Construct
TKIFAK

SEQ ID NO: 19354 - protein, 6 aa, ARTIFICIAL SEQUENCE
  Synthetic Construct
TKIFDK

SEQ ID NO: 19355 - protein, 6 aa, ARTIFICIAL SEQUENCE
  Synthetic Construct
TKIFEK

SEQ ID NO: 19356 - protein, 6 aa, ARTIFICIAL SEQUENCE
  Synthetic Construct
TKIFFK

SEQ ID NO: 19357 - protein, 6 aa, ARTIFICIAL SEQUENCE
  Synthetic Construct
TKIFGK

SEQ ID NO: 19358 - protein, 6 aa, ARTIFICIAL SEQUENCE
  Synthetic Construct
TKIFHK

SEQ ID NO: 19359 - protein, 6 aa, ARTIFICIAL SEQUENCE
  Synthetic Construct
TKIFIK

SEQ ID NO: 19360 - protein, 6 aa, ARTIFICIAL SEQUENCE
  Synthetic Construct
TKIFLK

SEQ ID NO: 19361 - protein, 6 aa, ARTIFICIAL SEQUENCE
  Synthetic Construct
TKIFNK

SEQ ID NO: 19362 - protein, 6 aa, ARTIFICIAL SEQUENCE
  Synthetic Construct
TKIFQK

SEQ ID NO: 19363 - protein, 6 aa, ARTIFICIAL SEQUENCE
  Synthetic Construct
TKIFRK

SEQ ID NO: 19364 - protein, 6 aa, ARTIFICIAL SEQUENCE
  Synthetic Construct
TKIFSK

SEQ ID NO: 19365 - protein, 6 aa, ARTIFICIAL SEQUENCE
  Synthetic Construct
TKIFTK

SEQ ID NO: 19366 - protein, 6 aa, ARTIFICIAL SEQUENCE
  Synthetic Construct
TKIFYK

SEQ ID NO: 19367 - protein, 6 aa, ARTIFICIAL SEQUENCE
  Synthetic Construct
TKIGAK

SEQ ID NO: 19368 - protein, 6 aa, ARTIFICIAL SEQUENCE
  Synthetic Construct
TKIGDK

SEQ ID NO: 19369 - protein, 6 aa, ARTIFICIAL SEQUENCE
  Synthetic Construct
TKIGEK

SEQ ID NO: 19370 - protein, 6 aa, ARTIFICIAL SEQUENCE
  Synthetic Construct
TKIGFK

SEQ ID NO: 19371 - protein, 6 aa, ARTIFICIAL SEQUENCE
  Synthetic Construct
TKIGGK

SEQ ID NO: 19372 - protein, 6 aa, ARTIFICIAL SEQUENCE
  Synthetic Construct
TKIGHK

SEQ ID NO: 19373 - protein, 6 aa, ARTIFICIAL SEQUENCE
  Synthetic Construct
TKIGIK

SEQ ID NO: 19374 - protein, 6 aa, ARTIFICIAL SEQUENCE
  Synthetic Construct
TKIGLK

SEQ ID NO: 19375 - protein, 6 aa, ARTIFICIAL SEQUENCE
  Synthetic Construct
TKIGNK

SEQ ID NO: 19376 - protein, 6 aa, ARTIFICIAL SEQUENCE
  Synthetic Construct
TKIGQK

SEQ ID NO: 19377 - protein, 6 aa, ARTIFICIAL SEQUENCE
  Synthetic Construct
TKIGRK

SEQ ID NO: 19378 - protein, 6 aa, ARTIFICIAL SEQUENCE
  Synthetic Construct
TKIGSK

SEQ ID NO: 19379 - protein, 6 aa, ARTIFICIAL SEQUENCE
  Synthetic Construct
TKIGTK

SEQ ID NO: 19380 - protein, 6 aa, ARTIFICIAL SEQUENCE
  Synthetic Construct
TKIGYK

SEQ ID NO: 19381 - protein, 6 aa, ARTIFICIAL SEQUENCE
  Synthetic Construct
TKIHAK

SEQ ID NO: 19382 - protein, 6 aa, ARTIFICIAL SEQUENCE
  Synthetic Construct
TKIHDK

SEQ ID NO: 19383 - protein, 6 aa, ARTIFICIAL SEQUENCE
  Synthetic Construct
TKIHEK

SEQ ID NO: 19384 - protein, 6 aa, ARTIFICIAL SEQUENCE
  Synthetic Construct
TKIHFK

SEQ ID NO: 19385 - protein, 6 aa, ARTIFICIAL SEQUENCE
  Synthetic Construct
TKIHGK

SEQ ID NO: 19386 - protein, 6 aa, ARTIFICIAL SEQUENCE
  Synthetic Construct
TKIHHK

SEQ ID NO: 19387 - protein, 6 aa, ARTIFICIAL SEQUENCE
  Synthetic Construct
TKIHIK

SEQ ID NO: 19388 - protein, 6 aa, ARTIFICIAL SEQUENCE
  Synthetic Construct
TKIHLK

SEQ ID NO: 19389 - protein, 6 aa, ARTIFICIAL SEQUENCE
  Synthetic Construct
TKIHNK

SEQ ID NO: 19390 - protein, 6 aa, ARTIFICIAL SEQUENCE
  Synthetic Construct
TKIHQK

SEQ ID NO: 19391 - protein, 6 aa, ARTIFICIAL SEQUENCE
  Synthetic Construct
TKIHRK

SEQ ID NO: 19392 - protein, 6 aa, ARTIFICIAL SEQUENCE
  Synthetic Construct
TKIHSK

SEQ ID NO: 19393 - protein, 6 aa, ARTIFICIAL SEQUENCE
  Synthetic Construct
TKIHTK

SEQ ID NO: 19394 - protein, 6 aa, ARTIFICIAL SEQUENCE
  Synthetic Construct
TKIHYK

SEQ ID NO: 19395 - protein, 6 aa, ARTIFICIAL SEQUENCE
  Synthetic Construct
TKIIAK

SEQ ID NO: 19396 - protein, 6 aa, ARTIFICIAL SEQUENCE
  Synthetic Construct
TKIIDK

SEQ ID NO: 19397 - protein, 6 aa, ARTIFICIAL SEQUENCE
  Synthetic Construct
TKIIEK

SEQ ID NO: 19398 - protein, 6 aa, ARTIFICIAL SEQUENCE
  Synthetic Construct
TKIIFK

SEQ ID NO: 19399 - protein, 6 aa, ARTIFICIAL SEQUENCE
  Synthetic Construct
TKIIGK

SEQ ID NO: 19400 - protein, 6 aa, ARTIFICIAL SEQUENCE
  Synthetic Construct
TKIIHK

SEQ ID NO: 19401 - protein, 6 aa, ARTIFICIAL SEQUENCE
  Synthetic Construct
TKIIIK

SEQ ID NO: 19402 - protein, 6 aa, ARTIFICIAL SEQUENCE
  Synthetic Construct
TKIILK

SEQ ID NO: 19403 - protein, 6 aa, ARTIFICIAL SEQUENCE
  Synthetic Construct
TKIINK

SEQ ID NO: 19404 - protein, 6 aa, ARTIFICIAL SEQUENCE
  Synthetic Construct
TKIIQK

SEQ ID NO: 19405 - protein, 6 aa, ARTIFICIAL SEQUENCE
  Synthetic Construct
TKIIRK

SEQ ID NO: 19406 - protein, 6 aa, ARTIFICIAL SEQUENCE
  Synthetic Construct
TKIISK

SEQ ID NO: 19407 - protein, 6 aa, ARTIFICIAL SEQUENCE
  Synthetic Construct
TKIITK

SEQ ID NO: 19408 - protein, 6 aa, ARTIFICIAL SEQUENCE
  Synthetic Construct
TKIIYK

SEQ ID NO: 19409 - protein, 6 aa, ARTIFICIAL SEQUENCE
  Synthetic Construct
TKILAK

SEQ ID NO: 19410 - protein, 6 aa, ARTIFICIAL SEQUENCE
  Synthetic Construct
TKILDK

SEQ ID NO: 19411 - protein, 6 aa, ARTIFICIAL SEQUENCE
  Synthetic Construct
TKILEK

SEQ ID NO: 19412 - protein, 6 aa, ARTIFICIAL SEQUENCE
  Synthetic Construct
TKILFK

SEQ ID NO: 19413 - protein, 6 aa, ARTIFICIAL SEQUENCE
  Synthetic Construct
TKILGK

SEQ ID NO: 19414 - protein, 6 aa, ARTIFICIAL SEQUENCE
  Synthetic Construct
TKILHK

SEQ ID NO: 19415 - protein, 6 aa, ARTIFICIAL SEQUENCE
  Synthetic Construct
TKILIK

SEQ ID NO: 19416 - protein, 6 aa, ARTIFICIAL SEQUENCE
  Synthetic Construct
TKILLK

SEQ ID NO: 19417 - protein, 6 aa, ARTIFICIAL SEQUENCE
  Synthetic Construct
TKILNK

SEQ ID NO: 19418 - protein, 6 aa, ARTIFICIAL SEQUENCE
  Synthetic Construct
TKILQK

SEQ ID NO: 19419 - protein, 6 aa, ARTIFICIAL SEQUENCE
  Synthetic Construct
TKILRK

SEQ ID NO: 19420 - protein, 6 aa, ARTIFICIAL SEQUENCE
  Synthetic Construct
TKILSK

SEQ ID NO: 19421 - protein, 6 aa, ARTIFICIAL SEQUENCE
  Synthetic Construct
TKILTK

SEQ ID NO: 19422 - protein, 6 aa, ARTIFICIAL SEQUENCE
  Synthetic Construct
TKILYK

SEQ ID NO: 19423 - protein, 6 aa, ARTIFICIAL SEQUENCE
  Synthetic Construct
TKINAK

SEQ ID NO: 19424 - protein, 6 aa, ARTIFICIAL SEQUENCE
  Synthetic Construct
TKINDK

SEQ ID NO: 19425 - protein, 6 aa, ARTIFICIAL SEQUENCE
  Synthetic Construct
TKINEK

SEQ ID NO: 19426 - protein, 6 aa, ARTIFICIAL SEQUENCE
  Synthetic Construct
TKINFK

SEQ ID NO: 19427 - protein, 6 aa, ARTIFICIAL SEQUENCE
  Synthetic Construct
TKINGK

SEQ ID NO: 19428 - protein, 6 aa, ARTIFICIAL SEQUENCE
  Synthetic Construct
TKINHK

SEQ ID NO: 19429 - protein, 6 aa, ARTIFICIAL SEQUENCE
  Synthetic Construct
TKINIK

SEQ ID NO: 19430 - protein, 6 aa, ARTIFICIAL SEQUENCE
  Synthetic Construct
TKINLK

SEQ ID NO: 19431 - protein, 6 aa, ARTIFICIAL SEQUENCE
  Synthetic Construct
TKINNK

SEQ ID NO: 19432 - protein, 6 aa, ARTIFICIAL SEQUENCE
  Synthetic Construct
TKINQK

SEQ ID NO: 19433 - protein, 6 aa, ARTIFICIAL SEQUENCE
  Synthetic Construct
TKINRK

SEQ ID NO: 19434 - protein, 6 aa, ARTIFICIAL SEQUENCE
  Synthetic Construct
TKINSK

SEQ ID NO: 19435 - protein, 6 aa, ARTIFICIAL SEQUENCE
  Synthetic Construct
TKINTK

SEQ ID NO: 19436 - protein, 6 aa, ARTIFICIAL SEQUENCE
  Synthetic Construct
TKINYK

SEQ ID NO: 19437 - protein, 6 aa, ARTIFICIAL SEQUENCE
  Synthetic Construct
TKIQAK

SEQ ID NO: 19438 - protein, 6 aa, ARTIFICIAL SEQUENCE
  Synthetic Construct
TKIQDK

SEQ ID NO: 19439 - protein, 6 aa, ARTIFICIAL SEQUENCE
  Synthetic Construct
TKIQEK

SEQ ID NO: 19440 - protein, 6 aa, ARTIFICIAL SEQUENCE
  Synthetic Construct
TKIQFK

SEQ ID NO: 19441 - protein, 6 aa, ARTIFICIAL SEQUENCE
  Synthetic Construct
TKIQGK

SEQ ID NO: 19442 - protein, 6 aa, ARTIFICIAL SEQUENCE
  Synthetic Construct
TKIQHK

SEQ ID NO: 19443 - protein, 6 aa, ARTIFICIAL SEQUENCE
  Synthetic Construct
TKIQIK

SEQ ID NO: 19444 - protein, 6 aa, ARTIFICIAL SEQUENCE
  Synthetic Construct
TKIQLK

SEQ ID NO: 19445 - protein, 6 aa, ARTIFICIAL SEQUENCE
  Synthetic Construct
TKIQNK

SEQ ID NO: 19446 - protein, 6 aa, ARTIFICIAL SEQUENCE
  Synthetic Construct
TKIQQK

SEQ ID NO: 19447 - protein, 6 aa, ARTIFICIAL SEQUENCE
  Synthetic Construct
TKIQRK

SEQ ID NO: 19448 - protein, 6 aa, ARTIFICIAL SEQUENCE
  Synthetic Construct
TKIQSK

SEQ ID NO: 19449 - protein, 6 aa, ARTIFICIAL SEQUENCE
  Synthetic Construct
TKIQTK

SEQ ID NO: 19450 - protein, 6 aa, ARTIFICIAL SEQUENCE
  Synthetic Construct
TKIQYK

SEQ ID NO: 19451 - protein, 6 aa, ARTIFICIAL SEQUENCE
  Synthetic Construct
TKIRAK

SEQ ID NO: 19452 - protein, 6 aa, ARTIFICIAL SEQUENCE
  Synthetic Construct
TKIRDK

SEQ ID NO: 19453 - protein, 6 aa, ARTIFICIAL SEQUENCE
  Synthetic Construct
TKIREK

SEQ ID NO: 19454 - protein, 6 aa, ARTIFICIAL SEQUENCE
  Synthetic Construct
TKIRFK

SEQ ID NO: 19455 - protein, 6 aa, ARTIFICIAL SEQUENCE
  Synthetic Construct
TKIRGK

SEQ ID NO: 19456 - protein, 6 aa, ARTIFICIAL SEQUENCE
  Synthetic Construct
TKIRHK

SEQ ID NO: 19457 - protein, 6 aa, ARTIFICIAL SEQUENCE
  Synthetic Construct
TKIRIK

SEQ ID NO: 19458 - protein, 6 aa, ARTIFICIAL SEQUENCE
  Synthetic Construct
TKIRLK

SEQ ID NO: 19459 - protein, 6 aa, ARTIFICIAL SEQUENCE
  Synthetic Construct
TKIRNK

SEQ ID NO: 19460 - protein, 6 aa, ARTIFICIAL SEQUENCE
  Synthetic Construct
TKIRQK

SEQ ID NO: 19461 - protein, 6 aa, ARTIFICIAL SEQUENCE
  Synthetic Construct
TKIRRK

SEQ ID NO: 19462 - protein, 6 aa, ARTIFICIAL SEQUENCE
  Synthetic Construct
TKIRSK

SEQ ID NO: 19463 - protein, 6 aa, ARTIFICIAL SEQUENCE
  Synthetic Construct
TKIRTK

SEQ ID NO: 19464 - protein, 6 aa, ARTIFICIAL SEQUENCE
  Synthetic Construct
TKIRYK

SEQ ID NO: 19465 - protein, 6 aa, ARTIFICIAL SEQUENCE
  Synthetic Construct
TKISAK

SEQ ID NO: 19466 - protein, 6 aa, ARTIFICIAL SEQUENCE
  Synthetic Construct
TKISDK

SEQ ID NO: 19467 - protein, 6 aa, ARTIFICIAL SEQUENCE
  Synthetic Construct
TKISEK

SEQ ID NO: 19468 - protein, 6 aa, ARTIFICIAL SEQUENCE
  Synthetic Construct
TKISFK

SEQ ID NO: 19469 - protein, 6 aa, ARTIFICIAL SEQUENCE
  Synthetic Construct
TKISGK

SEQ ID NO: 19470 - protein, 6 aa, ARTIFICIAL SEQUENCE
  Synthetic Construct
TKISHK

SEQ ID NO: 19471 - protein, 6 aa, ARTIFICIAL SEQUENCE
  Synthetic Construct
TKISIK

SEQ ID NO: 19472 - protein, 6 aa, ARTIFICIAL SEQUENCE
  Synthetic Construct
TKISLK

SEQ ID NO: 19473 - protein, 6 aa, ARTIFICIAL SEQUENCE
  Synthetic Construct
TKISNK

SEQ ID NO: 19474 - protein, 6 aa, ARTIFICIAL SEQUENCE
  Synthetic Construct
TKISQK

SEQ ID NO: 19475 - protein, 6 aa, ARTIFICIAL SEQUENCE
  Synthetic Construct
TKISRK

SEQ ID NO: 19476 - protein, 6 aa, ARTIFICIAL SEQUENCE
  Synthetic Construct
TKISSK

SEQ ID NO: 19477 - protein, 6 aa, ARTIFICIAL SEQUENCE
  Synthetic Construct
TKISTK

SEQ ID NO: 19478 - protein, 6 aa, ARTIFICIAL SEQUENCE
  Synthetic Construct
TKISYK

SEQ ID NO: 19479 - protein, 6 aa, ARTIFICIAL SEQUENCE
  Synthetic Construct
TKITAK

SEQ ID NO: 19480 - protein, 6 aa, ARTIFICIAL SEQUENCE
  Synthetic Construct
TKITDK

SEQ ID NO: 19481 - protein, 6 aa, ARTIFICIAL SEQUENCE
  Synthetic Construct
TKITEK

SEQ ID NO: 19482 - protein, 6 aa, ARTIFICIAL SEQUENCE
  Synthetic Construct
TKITFK

SEQ ID NO: 19483 - protein, 6 aa, ARTIFICIAL SEQUENCE
  Synthetic Construct
TKITGK

SEQ ID NO: 19484 - protein, 6 aa, ARTIFICIAL SEQUENCE
  Synthetic Construct
TKITHK

SEQ ID NO: 19485 - protein, 6 aa, ARTIFICIAL SEQUENCE
  Synthetic Construct
TKITIK

SEQ ID NO: 19486 - protein, 6 aa, ARTIFICIAL SEQUENCE
  Synthetic Construct
TKITLK

SEQ ID NO: 19487 - protein, 6 aa, ARTIFICIAL SEQUENCE
  Synthetic Construct
TKITNK

SEQ ID NO: 19488 - protein, 6 aa, ARTIFICIAL SEQUENCE
  Synthetic Construct
TKITQK

SEQ ID NO: 19489 - protein, 6 aa, ARTIFICIAL SEQUENCE
  Synthetic Construct
TKITRK

SEQ ID NO: 19490 - protein, 6 aa, ARTIFICIAL SEQUENCE
  Synthetic Construct
TKITSK

SEQ ID NO: 19491 - protein, 6 aa, ARTIFICIAL SEQUENCE
  Synthetic Construct
TKITTK

SEQ ID NO: 19492 - protein, 6 aa, ARTIFICIAL SEQUENCE
  Synthetic Construct
TKITYK

SEQ ID NO: 19493 - protein, 6 aa, ARTIFICIAL SEQUENCE
  Synthetic Construct
TKIYAK

SEQ ID NO: 19494 - protein, 6 aa, ARTIFICIAL SEQUENCE
  Synthetic Construct
TKIYDK

SEQ ID NO: 19495 - protein, 6 aa, ARTIFICIAL SEQUENCE
  Synthetic Construct
TKIYEK

SEQ ID NO: 19496 - protein, 6 aa, ARTIFICIAL SEQUENCE
  Synthetic Construct
TKIYFK

SEQ ID NO: 19497 - protein, 6 aa, ARTIFICIAL SEQUENCE
  Synthetic Construct
TKIYGK

SEQ ID NO: 19498 - protein, 6 aa, ARTIFICIAL SEQUENCE
  Synthetic Construct
TKIYHK

SEQ ID NO: 19499 - protein, 6 aa, ARTIFICIAL SEQUENCE
  Synthetic Construct
TKIYIK

SEQ ID NO: 19500 - protein, 6 aa, ARTIFICIAL SEQUENCE
  Synthetic Construct
TKIYLK

SEQ ID NO: 19501 - protein, 6 aa, ARTIFICIAL SEQUENCE
  Synthetic Construct
TKIYNK

SEQ ID NO: 19502 - protein, 6 aa, ARTIFICIAL SEQUENCE
  Synthetic Construct
TKIYQK

SEQ ID NO: 19503 - protein, 6 aa, ARTIFICIAL SEQUENCE
  Synthetic Construct
TKIYRK

SEQ ID NO: 19504 - protein, 6 aa, ARTIFICIAL SEQUENCE
  Synthetic Construct
TKIYSK

SEQ ID NO: 19505 - protein, 6 aa, ARTIFICIAL SEQUENCE
  Synthetic Construct
TKIYTK

SEQ ID NO: 19506 - protein, 6 aa, ARTIFICIAL SEQUENCE
  Synthetic Construct
TKIYYK

SEQ ID NO: 19507 - protein, 6 aa, ARTIFICIAL SEQUENCE
  Synthetic Construct
TKLAAK

SEQ ID NO: 19508 - protein, 6 aa, ARTIFICIAL SEQUENCE
  Synthetic Construct
TKLADK

SEQ ID NO: 19509 - protein, 6 aa, ARTIFICIAL SEQUENCE
  Synthetic Construct
TKLAEK

SEQ ID NO: 19510 - protein, 6 aa, ARTIFICIAL SEQUENCE
  Synthetic Construct
TKLAFK

SEQ ID NO: 19511 - protein, 6 aa, ARTIFICIAL SEQUENCE
  Synthetic Construct
TKLAGK

SEQ ID NO: 19512 - protein, 6 aa, ARTIFICIAL SEQUENCE
  Synthetic Construct
TKLAHK

SEQ ID NO: 19513 - protein, 6 aa, ARTIFICIAL SEQUENCE
  Synthetic Construct
TKLAIK

SEQ ID NO: 19514 - protein, 6 aa, ARTIFICIAL SEQUENCE
  Synthetic Construct
TKLALK

SEQ ID NO: 19515 - protein, 6 aa, ARTIFICIAL SEQUENCE
  Synthetic Construct
TKLANK

SEQ ID NO: 19516 - protein, 6 aa, ARTIFICIAL SEQUENCE
  Synthetic Construct
TKLAQK

SEQ ID NO: 19517 - protein, 6 aa, ARTIFICIAL SEQUENCE
  Synthetic Construct
TKLARK

SEQ ID NO: 19518 - protein, 6 aa, ARTIFICIAL SEQUENCE
  Synthetic Construct
TKLASK

SEQ ID NO: 19519 - protein, 6 aa, ARTIFICIAL SEQUENCE
  Synthetic Construct
TKLATK

SEQ ID NO: 19520 - protein, 6 aa, ARTIFICIAL SEQUENCE
  Synthetic Construct
TKLAYK

SEQ ID NO: 19521 - protein, 6 aa, ARTIFICIAL SEQUENCE
  Synthetic Construct
TKLDAK

SEQ ID NO: 19522 - protein, 6 aa, ARTIFICIAL SEQUENCE
  Synthetic Construct
TKLDDK

SEQ ID NO: 19523 - protein, 6 aa, ARTIFICIAL SEQUENCE
  Synthetic Construct
TKLDEK

SEQ ID NO: 19524 - protein, 6 aa, ARTIFICIAL SEQUENCE
  Synthetic Construct
TKLDFK

SEQ ID NO: 19525 - protein, 6 aa, ARTIFICIAL SEQUENCE
  Synthetic Construct
TKLDGK

SEQ ID NO: 19526 - protein, 6 aa, ARTIFICIAL SEQUENCE
  Synthetic Construct
TKLDHK

SEQ ID NO: 19527 - protein, 6 aa, ARTIFICIAL SEQUENCE
  Synthetic Construct
TKLDIK

SEQ ID NO: 19528 - protein, 6 aa, ARTIFICIAL SEQUENCE
  Synthetic Construct
TKLDLK

SEQ ID NO: 19529 - protein, 6 aa, ARTIFICIAL SEQUENCE
  Synthetic Construct
TKLDNK

SEQ ID NO: 19530 - protein, 6 aa, ARTIFICIAL SEQUENCE
  Synthetic Construct
TKLDQK

SEQ ID NO: 19531 - protein, 6 aa, ARTIFICIAL SEQUENCE
  Synthetic Construct
TKLDRK

SEQ ID NO: 19532 - protein, 6 aa, ARTIFICIAL SEQUENCE
  Synthetic Construct
TKLDSK

SEQ ID NO: 19533 - protein, 6 aa, ARTIFICIAL SEQUENCE
  Synthetic Construct
TKLDTK

SEQ ID NO: 19534 - protein, 6 aa, ARTIFICIAL SEQUENCE
  Synthetic Construct
TKLDYK

SEQ ID NO: 19535 - protein, 6 aa, ARTIFICIAL SEQUENCE
  Synthetic Construct
TKLEAK

SEQ ID NO: 19536 - protein, 6 aa, ARTIFICIAL SEQUENCE
  Synthetic Construct
TKLEDK

SEQ ID NO: 19537 - protein, 6 aa, ARTIFICIAL SEQUENCE
  Synthetic Construct
TKLEEK

SEQ ID NO: 19538 - protein, 6 aa, ARTIFICIAL SEQUENCE
  Synthetic Construct
TKLEFK

SEQ ID NO: 19539 - protein, 6 aa, ARTIFICIAL SEQUENCE
  Synthetic Construct
TKLEGK

SEQ ID NO: 19540 - protein, 6 aa, ARTIFICIAL SEQUENCE
  Synthetic Construct
TKLEHK

SEQ ID NO: 19541 - protein, 6 aa, ARTIFICIAL SEQUENCE
  Synthetic Construct
TKLEIK

SEQ ID NO: 19542 - protein, 6 aa, ARTIFICIAL SEQUENCE
  Synthetic Construct
TKLELK

SEQ ID NO: 19543 - protein, 6 aa, ARTIFICIAL SEQUENCE
  Synthetic Construct
TKLENK

SEQ ID NO: 19544 - protein, 6 aa, ARTIFICIAL SEQUENCE
  Synthetic Construct
TKLEQK

SEQ ID NO: 19545 - protein, 6 aa, ARTIFICIAL SEQUENCE
  Synthetic Construct
TKLERK

SEQ ID NO: 19546 - protein, 6 aa, ARTIFICIAL SEQUENCE
  Synthetic Construct
TKLESK

SEQ ID NO: 19547 - protein, 6 aa, ARTIFICIAL SEQUENCE
  Synthetic Construct
TKLETK

SEQ ID NO: 19548 - protein, 6 aa, ARTIFICIAL SEQUENCE
  Synthetic Construct
TKLEYK

SEQ ID NO: 19549 - protein, 6 aa, ARTIFICIAL SEQUENCE
  Synthetic Construct
TKLFAK

SEQ ID NO: 19550 - protein, 6 aa, ARTIFICIAL SEQUENCE
  Synthetic Construct
TKLFDK

SEQ ID NO: 19551 - protein, 6 aa, ARTIFICIAL SEQUENCE
  Synthetic Construct
TKLFEK

SEQ ID NO: 19552 - protein, 6 aa, ARTIFICIAL SEQUENCE
  Synthetic Construct
TKLFFK

SEQ ID NO: 19553 - protein, 6 aa, ARTIFICIAL SEQUENCE
  Synthetic Construct
TKLFGK

SEQ ID NO: 19554 - protein, 6 aa, ARTIFICIAL SEQUENCE
  Synthetic Construct
TKLFHK

SEQ ID NO: 19555 - protein, 6 aa, ARTIFICIAL SEQUENCE
  Synthetic Construct
TKLFIK

SEQ ID NO: 19556 - protein, 6 aa, ARTIFICIAL SEQUENCE
  Synthetic Construct
TKLFLK

SEQ ID NO: 19557 - protein, 6 aa, ARTIFICIAL SEQUENCE
  Synthetic Construct
TKLFNK

SEQ ID NO: 19558 - protein, 6 aa, ARTIFICIAL SEQUENCE
  Synthetic Construct
TKLFQK

SEQ ID NO: 19559 - protein, 6 aa, ARTIFICIAL SEQUENCE
  Synthetic Construct
TKLFRK

SEQ ID NO: 19560 - protein, 6 aa, ARTIFICIAL SEQUENCE
  Synthetic Construct
TKLFSK

SEQ ID NO: 19561 - protein, 6 aa, ARTIFICIAL SEQUENCE
  Synthetic Construct
TKLFTK

SEQ ID NO: 19562 - protein, 6 aa, ARTIFICIAL SEQUENCE
  Synthetic Construct
TKLFYK

SEQ ID NO: 19563 - protein, 6 aa, ARTIFICIAL SEQUENCE
  Synthetic Construct
TKLGAK

SEQ ID NO: 19564 - protein, 6 aa, ARTIFICIAL SEQUENCE
  Synthetic Construct
TKLGDK

SEQ ID NO: 19565 - protein, 6 aa, ARTIFICIAL SEQUENCE
  Synthetic Construct
TKLGEK

SEQ ID NO: 19566 - protein, 6 aa, ARTIFICIAL SEQUENCE
  Synthetic Construct
TKLGFK

SEQ ID NO: 19567 - protein, 6 aa, ARTIFICIAL SEQUENCE
  Synthetic Construct
TKLGGK

SEQ ID NO: 19568 - protein, 6 aa, ARTIFICIAL SEQUENCE
  Synthetic Construct
TKLGHK

SEQ ID NO: 19569 - protein, 6 aa, ARTIFICIAL SEQUENCE
  Synthetic Construct
TKLGIK

SEQ ID NO: 19570 - protein, 6 aa, ARTIFICIAL SEQUENCE
  Synthetic Construct
TKLGLK

SEQ ID NO: 19571 - protein, 6 aa, ARTIFICIAL SEQUENCE
  Synthetic Construct
TKLGNK

SEQ ID NO: 19572 - protein, 6 aa, ARTIFICIAL SEQUENCE
  Synthetic Construct
TKLGQK

SEQ ID NO: 19573 - protein, 6 aa, ARTIFICIAL SEQUENCE
  Synthetic Construct
TKLGRK

SEQ ID NO: 19574 - protein, 6 aa, ARTIFICIAL SEQUENCE
  Synthetic Construct
TKLGSK

SEQ ID NO: 19575 - protein, 6 aa, ARTIFICIAL SEQUENCE
  Synthetic Construct
TKLGTK

SEQ ID NO: 19576 - protein, 6 aa, ARTIFICIAL SEQUENCE
  Synthetic Construct
TKLGYK

SEQ ID NO: 19577 - protein, 6 aa, ARTIFICIAL SEQUENCE
  Synthetic Construct
TKLHAK

SEQ ID NO: 19578 - protein, 6 aa, ARTIFICIAL SEQUENCE
  Synthetic Construct
TKLHDK

SEQ ID NO: 19579 - protein, 6 aa, ARTIFICIAL SEQUENCE
  Synthetic Construct
TKLHEK

SEQ ID NO: 19580 - protein, 6 aa, ARTIFICIAL SEQUENCE
  Synthetic Construct
TKLHFK

SEQ ID NO: 19581 - protein, 6 aa, ARTIFICIAL SEQUENCE
  Synthetic Construct
TKLHGK

SEQ ID NO: 19582 - protein, 6 aa, ARTIFICIAL SEQUENCE
  Synthetic Construct
TKLHHK

SEQ ID NO: 19583 - protein, 6 aa, ARTIFICIAL SEQUENCE
  Synthetic Construct
TKLHIK

SEQ ID NO: 19584 - protein, 6 aa, ARTIFICIAL SEQUENCE
  Synthetic Construct
TKLHLK

SEQ ID NO: 19585 - protein, 6 aa, ARTIFICIAL SEQUENCE
  Synthetic Construct
TKLHNK

SEQ ID NO: 19586 - protein, 6 aa, ARTIFICIAL SEQUENCE
  Synthetic Construct
TKLHQK

SEQ ID NO: 19587 - protein, 6 aa, ARTIFICIAL SEQUENCE
  Synthetic Construct
TKLHRK

SEQ ID NO: 19588 - protein, 6 aa, ARTIFICIAL SEQUENCE
  Synthetic Construct
TKLHSK

SEQ ID NO: 19589 - protein, 6 aa, ARTIFICIAL SEQUENCE
  Synthetic Construct
TKLHTK

SEQ ID NO: 19590 - protein, 6 aa, ARTIFICIAL SEQUENCE
  Synthetic Construct
TKLHYK

SEQ ID NO: 19591 - protein, 6 aa, ARTIFICIAL SEQUENCE
  Synthetic Construct
TKLIAK

SEQ ID NO: 19592 - protein, 6 aa, ARTIFICIAL SEQUENCE
  Synthetic Construct
TKLIDK

SEQ ID NO: 19593 - protein, 6 aa, ARTIFICIAL SEQUENCE
  Synthetic Construct
TKLIEK

SEQ ID NO: 19594 - protein, 6 aa, ARTIFICIAL SEQUENCE
  Synthetic Construct
TKLIFK

SEQ ID NO: 19595 - protein, 6 aa, ARTIFICIAL SEQUENCE
  Synthetic Construct
TKLIGK

SEQ ID NO: 19596 - protein, 6 aa, ARTIFICIAL SEQUENCE
  Synthetic Construct
TKLIHK

SEQ ID NO: 19597 - protein, 6 aa, ARTIFICIAL SEQUENCE
  Synthetic Construct
TKLIIK

SEQ ID NO: 19598 - protein, 6 aa, ARTIFICIAL SEQUENCE
  Synthetic Construct
TKLILK

SEQ ID NO: 19599 - protein, 6 aa, ARTIFICIAL SEQUENCE
  Synthetic Construct
TKLINK

SEQ ID NO: 19600 - protein, 6 aa, ARTIFICIAL SEQUENCE
  Synthetic Construct
TKLIQK

SEQ ID NO: 19601 - protein, 6 aa, ARTIFICIAL SEQUENCE
  Synthetic Construct
TKLIRK

SEQ ID NO: 19602 - protein, 6 aa, ARTIFICIAL SEQUENCE
  Synthetic Construct
TKLISK

SEQ ID NO: 19603 - protein, 6 aa, ARTIFICIAL SEQUENCE
  Synthetic Construct
TKLITK

SEQ ID NO: 19604 - protein, 6 aa, ARTIFICIAL SEQUENCE
  Synthetic Construct
TKLIYK

SEQ ID NO: 19605 - protein, 6 aa, ARTIFICIAL SEQUENCE
  Synthetic Construct
TKLLAK

SEQ ID NO: 19606 - protein, 6 aa, ARTIFICIAL SEQUENCE
  Synthetic Construct
TKLLDK

SEQ ID NO: 19607 - protein, 6 aa, ARTIFICIAL SEQUENCE
  Synthetic Construct
TKLLEK

SEQ ID NO: 19608 - protein, 6 aa, ARTIFICIAL SEQUENCE
  Synthetic Construct
TKLLFK

SEQ ID NO: 19609 - protein, 6 aa, ARTIFICIAL SEQUENCE
  Synthetic Construct
TKLLGK

SEQ ID NO: 19610 - protein, 6 aa, ARTIFICIAL SEQUENCE
  Synthetic Construct
TKLLHK

SEQ ID NO: 19611 - protein, 6 aa, ARTIFICIAL SEQUENCE
  Synthetic Construct
TKLLIK

SEQ ID NO: 19612 - protein, 6 aa, ARTIFICIAL SEQUENCE
  Synthetic Construct
TKLLLK

SEQ ID NO: 19613 - protein, 6 aa, ARTIFICIAL SEQUENCE
  Synthetic Construct
TKLLNK

SEQ ID NO: 19614 - protein, 6 aa, ARTIFICIAL SEQUENCE
  Synthetic Construct
TKLLQK

SEQ ID NO: 19615 - protein, 6 aa, ARTIFICIAL SEQUENCE
  Synthetic Construct
TKLLRK

SEQ ID NO: 19616 - protein, 6 aa, ARTIFICIAL SEQUENCE
  Synthetic Construct
TKLLSK

SEQ ID NO: 19617 - protein, 6 aa, ARTIFICIAL SEQUENCE
  Synthetic Construct
TKLLTK

SEQ ID NO: 19618 - protein, 6 aa, ARTIFICIAL SEQUENCE
  Synthetic Construct
TKLLYK

SEQ ID NO: 19619 - protein, 6 aa, ARTIFICIAL SEQUENCE
  Synthetic Construct
TKLNAK

SEQ ID NO: 19620 - protein, 6 aa, ARTIFICIAL SEQUENCE
  Synthetic Construct
TKLNDK

SEQ ID NO: 19621 - protein, 6 aa, ARTIFICIAL SEQUENCE
  Synthetic Construct
TKLNEK

SEQ ID NO: 19622 - protein, 6 aa, ARTIFICIAL SEQUENCE
  Synthetic Construct
TKLNFK

SEQ ID NO: 19623 - protein, 6 aa, ARTIFICIAL SEQUENCE
  Synthetic Construct
TKLNGK

SEQ ID NO: 19624 - protein, 6 aa, ARTIFICIAL SEQUENCE
  Synthetic Construct
TKLNHK

SEQ ID NO: 19625 - protein, 6 aa, ARTIFICIAL SEQUENCE
  Synthetic Construct
TKLNIK

SEQ ID NO: 19626 - protein, 6 aa, ARTIFICIAL SEQUENCE
  Synthetic Construct
TKLNLK

SEQ ID NO: 19627 - protein, 6 aa, ARTIFICIAL SEQUENCE
  Synthetic Construct
TKLNNK

SEQ ID NO: 19628 - protein, 6 aa, ARTIFICIAL SEQUENCE
  Synthetic Construct
TKLNQK

SEQ ID NO: 19629 - protein, 6 aa, ARTIFICIAL SEQUENCE
  Synthetic Construct
TKLNRK

SEQ ID NO: 19630 - protein, 6 aa, ARTIFICIAL SEQUENCE
  Synthetic Construct
TKLNSK

SEQ ID NO: 19631 - protein, 6 aa, ARTIFICIAL SEQUENCE
  Synthetic Construct
TKLNTK

SEQ ID NO: 19632 - protein, 6 aa, ARTIFICIAL SEQUENCE
  Synthetic Construct
TKLNYK

SEQ ID NO: 19633 - protein, 6 aa, ARTIFICIAL SEQUENCE
  Synthetic Construct
TKLQAK

SEQ ID NO: 19634 - protein, 6 aa, ARTIFICIAL SEQUENCE
  Synthetic Construct
TKLQDK

SEQ ID NO: 19635 - protein, 6 aa, ARTIFICIAL SEQUENCE
  Synthetic Construct
TKLQEK

SEQ ID NO: 19636 - protein, 6 aa, ARTIFICIAL SEQUENCE
  Synthetic Construct
TKLQFK

SEQ ID NO: 19637 - protein, 6 aa, ARTIFICIAL SEQUENCE
  Synthetic Construct
TKLQGK

SEQ ID NO: 19638 - protein, 6 aa, ARTIFICIAL SEQUENCE
  Synthetic Construct
TKLQHK

SEQ ID NO: 19639 - protein, 6 aa, ARTIFICIAL SEQUENCE
  Synthetic Construct
TKLQIK

SEQ ID NO: 19640 - protein, 6 aa, ARTIFICIAL SEQUENCE
  Synthetic Construct
TKLQLK

SEQ ID NO: 19641 - protein, 6 aa, ARTIFICIAL SEQUENCE
  Synthetic Construct
TKLQNK

SEQ ID NO: 19642 - protein, 6 aa, ARTIFICIAL SEQUENCE
  Synthetic Construct
TKLQQK

SEQ ID NO: 19643 - protein, 6 aa, ARTIFICIAL SEQUENCE
  Synthetic Construct
TKLQRK

SEQ ID NO: 19644 - protein, 6 aa, ARTIFICIAL SEQUENCE
  Synthetic Construct
TKLQSK

SEQ ID NO: 19645 - protein, 6 aa, ARTIFICIAL SEQUENCE
  Synthetic Construct
TKLQTK

SEQ ID NO: 19646 - protein, 6 aa, ARTIFICIAL SEQUENCE
  Synthetic Construct
TKLQYK

SEQ ID NO: 19647 - protein, 6 aa, ARTIFICIAL SEQUENCE
  Synthetic Construct
TKLRAK

SEQ ID NO: 19648 - protein, 6 aa, ARTIFICIAL SEQUENCE
  Synthetic Construct
TKLRDK

SEQ ID NO: 19649 - protein, 6 aa, ARTIFICIAL SEQUENCE
  Synthetic Construct
TKLREK

SEQ ID NO: 19650 - protein, 6 aa, ARTIFICIAL SEQUENCE
  Synthetic Construct
TKLRFK

SEQ ID NO: 19651 - protein, 6 aa, ARTIFICIAL SEQUENCE
  Synthetic Construct
TKLRGK

SEQ ID NO: 19652 - protein, 6 aa, ARTIFICIAL SEQUENCE
  Synthetic Construct
TKLRHK

SEQ ID NO: 19653 - protein, 6 aa, ARTIFICIAL SEQUENCE
  Synthetic Construct
TKLRIK

SEQ ID NO: 19654 - protein, 6 aa, ARTIFICIAL SEQUENCE
  Synthetic Construct
TKLRLK

SEQ ID NO: 19655 - protein, 6 aa, ARTIFICIAL SEQUENCE
  Synthetic Construct
TKLRNK

SEQ ID NO: 19656 - protein, 6 aa, ARTIFICIAL SEQUENCE
  Synthetic Construct
TKLRQK

SEQ ID NO: 19657 - protein, 6 aa, ARTIFICIAL SEQUENCE
  Synthetic Construct
TKLRRK

SEQ ID NO: 19658 - protein, 6 aa, ARTIFICIAL SEQUENCE
  Synthetic Construct
TKLRSK

SEQ ID NO: 19659 - protein, 6 aa, ARTIFICIAL SEQUENCE
  Synthetic Construct
TKLRTK

SEQ ID NO: 19660 - protein, 6 aa, ARTIFICIAL SEQUENCE
  Synthetic Construct
TKLRYK

SEQ ID NO: 19661 - protein, 6 aa, ARTIFICIAL SEQUENCE
  Synthetic Construct
TKLSAK

SEQ ID NO: 19662 - protein, 6 aa, ARTIFICIAL SEQUENCE
  Synthetic Construct
TKLSDK

SEQ ID NO: 19663 - protein, 6 aa, ARTIFICIAL SEQUENCE
  Synthetic Construct
TKLSEK

SEQ ID NO: 19664 - protein, 6 aa, ARTIFICIAL SEQUENCE
  Synthetic Construct
TKLSFK

SEQ ID NO: 19665 - protein, 6 aa, ARTIFICIAL SEQUENCE
  Synthetic Construct
TKLSGK

SEQ ID NO: 19666 - protein, 6 aa, ARTIFICIAL SEQUENCE
  Synthetic Construct
TKLSHK

SEQ ID NO: 19667 - protein, 6 aa, ARTIFICIAL SEQUENCE
  Synthetic Construct
TKLSIK

SEQ ID NO: 19668 - protein, 6 aa, ARTIFICIAL SEQUENCE
  Synthetic Construct
TKLSLK

SEQ ID NO: 19669 - protein, 6 aa, ARTIFICIAL SEQUENCE
  Synthetic Construct
TKLSNK

SEQ ID NO: 19670 - protein, 6 aa, ARTIFICIAL SEQUENCE
  Synthetic Construct
TKLSQK

SEQ ID NO: 19671 - protein, 6 aa, ARTIFICIAL SEQUENCE
  Synthetic Construct
TKLSRK

SEQ ID NO: 19672 - protein, 6 aa, ARTIFICIAL SEQUENCE
  Synthetic Construct
TKLSSK

SEQ ID NO: 19673 - protein, 6 aa, ARTIFICIAL SEQUENCE
  Synthetic Construct
TKLSTK

SEQ ID NO: 19674 - protein, 6 aa, ARTIFICIAL SEQUENCE
  Synthetic Construct
TKLSYK

SEQ ID NO: 19675 - protein, 6 aa, ARTIFICIAL SEQUENCE
  Synthetic Construct
TKLTAK

SEQ ID NO: 19676 - protein, 6 aa, ARTIFICIAL SEQUENCE
  Synthetic Construct
TKLTDK

SEQ ID NO: 19677 - protein, 6 aa, ARTIFICIAL SEQUENCE
  Synthetic Construct
TKLTEK

SEQ ID NO: 19678 - protein, 6 aa, ARTIFICIAL SEQUENCE
  Synthetic Construct
TKLTFK

SEQ ID NO: 19679 - protein, 6 aa, ARTIFICIAL SEQUENCE
  Synthetic Construct
TKLTGK

SEQ ID NO: 19680 - protein, 6 aa, ARTIFICIAL SEQUENCE
  Synthetic Construct
TKLTHK

SEQ ID NO: 19681 - protein, 6 aa, ARTIFICIAL SEQUENCE
  Synthetic Construct
TKLTIK

SEQ ID NO: 19682 - protein, 6 aa, ARTIFICIAL SEQUENCE
  Synthetic Construct
TKLTLK

SEQ ID NO: 19683 - protein, 6 aa, ARTIFICIAL SEQUENCE
  Synthetic Construct
TKLTNK

SEQ ID NO: 19684 - protein, 6 aa, ARTIFICIAL SEQUENCE
  Synthetic Construct
TKLTQK

SEQ ID NO: 19685 - protein, 6 aa, ARTIFICIAL SEQUENCE
  Synthetic Construct
TKLTRK

SEQ ID NO: 19686 - protein, 6 aa, ARTIFICIAL SEQUENCE
  Synthetic Construct
TKLTSK

SEQ ID NO: 19687 - protein, 6 aa, ARTIFICIAL SEQUENCE
  Synthetic Construct
TKLTTK

SEQ ID NO: 19688 - protein, 6 aa, ARTIFICIAL SEQUENCE
  Synthetic Construct
TKLTYK

SEQ ID NO: 19689 - protein, 6 aa, ARTIFICIAL SEQUENCE
  Synthetic Construct
TKLYAK

SEQ ID NO: 19690 - protein, 6 aa, ARTIFICIAL SEQUENCE
  Synthetic Construct
TKLYDK

SEQ ID NO: 19691 - protein, 6 aa, ARTIFICIAL SEQUENCE
  Synthetic Construct
TKLYEK

SEQ ID NO: 19692 - protein, 6 aa, ARTIFICIAL SEQUENCE
  Synthetic Construct
TKLYFK

SEQ ID NO: 19693 - protein, 6 aa, ARTIFICIAL SEQUENCE
  Synthetic Construct
TKLYGK

SEQ ID NO: 19694 - protein, 6 aa, ARTIFICIAL SEQUENCE
  Synthetic Construct
TKLYHK

SEQ ID NO: 19695 - protein, 6 aa, ARTIFICIAL SEQUENCE
  Synthetic Construct
TKLYIK

SEQ ID NO: 19696 - protein, 6 aa, ARTIFICIAL SEQUENCE
  Synthetic Construct
TKLYLK

SEQ ID NO: 19697 - protein, 6 aa, ARTIFICIAL SEQUENCE
  Synthetic Construct
TKLYNK

SEQ ID NO: 19698 - protein, 6 aa, ARTIFICIAL SEQUENCE
  Synthetic Construct
TKLYQK

SEQ ID NO: 19699 - protein, 6 aa, ARTIFICIAL SEQUENCE
  Synthetic Construct
TKLYRK

SEQ ID NO: 19700 - protein, 6 aa, ARTIFICIAL SEQUENCE
  Synthetic Construct
TKLYSK

SEQ ID NO: 19701 - protein, 6 aa, ARTIFICIAL SEQUENCE
  Synthetic Construct
TKLYTK

SEQ ID NO: 19702 - protein, 6 aa, ARTIFICIAL SEQUENCE
  Synthetic Construct
TKLYYK

SEQ ID NO: 19703 - protein, 6 aa, ARTIFICIAL SEQUENCE
  Synthetic Construct
TKNAAK

SEQ ID NO: 19704 - protein, 6 aa, ARTIFICIAL SEQUENCE
  Synthetic Construct
TKNADK

SEQ ID NO: 19705 - protein, 6 aa, ARTIFICIAL SEQUENCE
  Synthetic Construct
TKNAEK

SEQ ID NO: 19706 - protein, 6 aa, ARTIFICIAL SEQUENCE
  Synthetic Construct
TKNAFK

SEQ ID NO: 19707 - protein, 6 aa, ARTIFICIAL SEQUENCE
  Synthetic Construct
TKNAGK

SEQ ID NO: 19708 - protein, 6 aa, ARTIFICIAL SEQUENCE
  Synthetic Construct
TKNAHK

SEQ ID NO: 19709 - protein, 6 aa, ARTIFICIAL SEQUENCE
  Synthetic Construct
TKNAIK

SEQ ID NO: 19710 - protein, 6 aa, ARTIFICIAL SEQUENCE
  Synthetic Construct
TKNALK

SEQ ID NO: 19711 - protein, 6 aa, ARTIFICIAL SEQUENCE
  Synthetic Construct
TKNANK

SEQ ID NO: 19712 - protein, 6 aa, ARTIFICIAL SEQUENCE
  Synthetic Construct
TKNAQK

SEQ ID NO: 19713 - protein, 6 aa, ARTIFICIAL SEQUENCE
  Synthetic Construct
TKNARK

SEQ ID NO: 19714 - protein, 6 aa, ARTIFICIAL SEQUENCE
  Synthetic Construct
TKNASK

SEQ ID NO: 19715 - protein, 6 aa, ARTIFICIAL SEQUENCE
  Synthetic Construct
TKNATK

SEQ ID NO: 19716 - protein, 6 aa, ARTIFICIAL SEQUENCE
  Synthetic Construct
TKNAYK

SEQ ID NO: 19717 - protein, 6 aa, ARTIFICIAL SEQUENCE
  Synthetic Construct
TKNDAK

SEQ ID NO: 19718 - protein, 6 aa, ARTIFICIAL SEQUENCE
  Synthetic Construct
TKNDDK

SEQ ID NO: 19719 - protein, 6 aa, ARTIFICIAL SEQUENCE
  Synthetic Construct
TKNDEK

SEQ ID NO: 19720 - protein, 6 aa, ARTIFICIAL SEQUENCE
  Synthetic Construct
TKNDFK

SEQ ID NO: 19721 - protein, 6 aa, ARTIFICIAL SEQUENCE
  Synthetic Construct
TKNDGK

SEQ ID NO: 19722 - protein, 6 aa, ARTIFICIAL SEQUENCE
  Synthetic Construct
TKNDHK

SEQ ID NO: 19723 - protein, 6 aa, ARTIFICIAL SEQUENCE
  Synthetic Construct
TKNDIK

SEQ ID NO: 19724 - protein, 6 aa, ARTIFICIAL SEQUENCE
  Synthetic Construct
TKNDLK

SEQ ID NO: 19725 - protein, 6 aa, ARTIFICIAL SEQUENCE
  Synthetic Construct
TKNDNK

SEQ ID NO: 19726 - protein, 6 aa, ARTIFICIAL SEQUENCE
  Synthetic Construct
TKNDQK

SEQ ID NO: 19727 - protein, 6 aa, ARTIFICIAL SEQUENCE
  Synthetic Construct
TKNDRK

SEQ ID NO: 19728 - protein, 6 aa, ARTIFICIAL SEQUENCE
  Synthetic Construct
TKNDSK

SEQ ID NO: 19729 - protein, 6 aa, ARTIFICIAL SEQUENCE
  Synthetic Construct
TKNDTK

SEQ ID NO: 19730 - protein, 6 aa, ARTIFICIAL SEQUENCE
  Synthetic Construct
TKNDYK

SEQ ID NO: 19731 - protein, 6 aa, ARTIFICIAL SEQUENCE
  Synthetic Construct
TKNEAK

SEQ ID NO: 19732 - protein, 6 aa, ARTIFICIAL SEQUENCE
  Synthetic Construct
TKNEDK

SEQ ID NO: 19733 - protein, 6 aa, ARTIFICIAL SEQUENCE
  Synthetic Construct
TKNEEK

SEQ ID NO: 19734 - protein, 6 aa, ARTIFICIAL SEQUENCE
  Synthetic Construct
TKNEFK

SEQ ID NO: 19735 - protein, 6 aa, ARTIFICIAL SEQUENCE
  Synthetic Construct
TKNEGK

SEQ ID NO: 19736 - protein, 6 aa, ARTIFICIAL SEQUENCE
  Synthetic Construct
TKNEHK

SEQ ID NO: 19737 - protein, 6 aa, ARTIFICIAL SEQUENCE
  Synthetic Construct
TKNEIK

SEQ ID NO: 19738 - protein, 6 aa, ARTIFICIAL SEQUENCE
  Synthetic Construct
TKNELK

SEQ ID NO: 19739 - protein, 6 aa, ARTIFICIAL SEQUENCE
  Synthetic Construct
TKNENK

SEQ ID NO: 19740 - protein, 6 aa, ARTIFICIAL SEQUENCE
  Synthetic Construct
TKNEQK

SEQ ID NO: 19741 - protein, 6 aa, ARTIFICIAL SEQUENCE
  Synthetic Construct
TKNERK

SEQ ID NO: 19742 - protein, 6 aa, ARTIFICIAL SEQUENCE
  Synthetic Construct
TKNESK

SEQ ID NO: 19743 - protein, 6 aa, ARTIFICIAL SEQUENCE
  Synthetic Construct
TKNETK

SEQ ID NO: 19744 - protein, 6 aa, ARTIFICIAL SEQUENCE
  Synthetic Construct
TKNEYK

SEQ ID NO: 19745 - protein, 6 aa, ARTIFICIAL SEQUENCE
  Synthetic Construct
TKNFAK

SEQ ID NO: 19746 - protein, 6 aa, ARTIFICIAL SEQUENCE
  Synthetic Construct
TKNFDK

SEQ ID NO: 19747 - protein, 6 aa, ARTIFICIAL SEQUENCE
  Synthetic Construct
TKNFEK

SEQ ID NO: 19748 - protein, 6 aa, ARTIFICIAL SEQUENCE
  Synthetic Construct
TKNFFK

SEQ ID NO: 19749 - protein, 6 aa, ARTIFICIAL SEQUENCE
  Synthetic Construct
TKNFGK

SEQ ID NO: 19750 - protein, 6 aa, ARTIFICIAL SEQUENCE
  Synthetic Construct
TKNFHK

SEQ ID NO: 19751 - protein, 6 aa, ARTIFICIAL SEQUENCE
  Synthetic Construct
TKNFIK

SEQ ID NO: 19752 - protein, 6 aa, ARTIFICIAL SEQUENCE
  Synthetic Construct
TKNFLK

SEQ ID NO: 19753 - protein, 6 aa, ARTIFICIAL SEQUENCE
  Synthetic Construct
TKNFNK

SEQ ID NO: 19754 - protein, 6 aa, ARTIFICIAL SEQUENCE
  Synthetic Construct
TKNFQK

SEQ ID NO: 19755 - protein, 6 aa, ARTIFICIAL SEQUENCE
  Synthetic Construct
TKNFRK

SEQ ID NO: 19756 - protein, 6 aa, ARTIFICIAL SEQUENCE
  Synthetic Construct
TKNFSK

SEQ ID NO: 19757 - protein, 6 aa, ARTIFICIAL SEQUENCE
  Synthetic Construct
TKNFTK

SEQ ID NO: 19758 - protein, 6 aa, ARTIFICIAL SEQUENCE
  Synthetic Construct
TKNFYK

SEQ ID NO: 19759 - protein, 6 aa, ARTIFICIAL SEQUENCE
  Synthetic Construct
TKNGAK

SEQ ID NO: 19760 - protein, 6 aa, ARTIFICIAL SEQUENCE
  Synthetic Construct
TKNGDK

SEQ ID NO: 19761 - protein, 6 aa, ARTIFICIAL SEQUENCE
  Synthetic Construct
TKNGEK

SEQ ID NO: 19762 - protein, 6 aa, ARTIFICIAL SEQUENCE
  Synthetic Construct
TKNGFK

SEQ ID NO: 19763 - protein, 6 aa, ARTIFICIAL SEQUENCE
  Synthetic Construct
TKNGGK

SEQ ID NO: 19764 - protein, 6 aa, ARTIFICIAL SEQUENCE
  Synthetic Construct
TKNGHK

SEQ ID NO: 19765 - protein, 6 aa, ARTIFICIAL SEQUENCE
  Synthetic Construct
TKNGIK

SEQ ID NO: 19766 - protein, 6 aa, ARTIFICIAL SEQUENCE
  Synthetic Construct
TKNGLK

SEQ ID NO: 19767 - protein, 6 aa, ARTIFICIAL SEQUENCE
  Synthetic Construct
TKNGNK

SEQ ID NO: 19768 - protein, 6 aa, ARTIFICIAL SEQUENCE
  Synthetic Construct
TKNGQK

SEQ ID NO: 19769 - protein, 6 aa, ARTIFICIAL SEQUENCE
  Synthetic Construct
TKNGRK

SEQ ID NO: 19770 - protein, 6 aa, ARTIFICIAL SEQUENCE
  Synthetic Construct
TKNGSK

SEQ ID NO: 19771 - protein, 6 aa, ARTIFICIAL SEQUENCE
  Synthetic Construct
TKNGTK

SEQ ID NO: 19772 - protein, 6 aa, ARTIFICIAL SEQUENCE
  Synthetic Construct
TKNGYK

SEQ ID NO: 19773 - protein, 6 aa, ARTIFICIAL SEQUENCE
  Synthetic Construct
TKNHAK

SEQ ID NO: 19774 - protein, 6 aa, ARTIFICIAL SEQUENCE
  Synthetic Construct
TKNHDK

SEQ ID NO: 19775 - protein, 6 aa, ARTIFICIAL SEQUENCE
  Synthetic Construct
TKNHEK

SEQ ID NO: 19776 - protein, 6 aa, ARTIFICIAL SEQUENCE
  Synthetic Construct
TKNHFK

SEQ ID NO: 19777 - protein, 6 aa, ARTIFICIAL SEQUENCE
  Synthetic Construct
TKNHGK

SEQ ID NO: 19778 - protein, 6 aa, ARTIFICIAL SEQUENCE
  Synthetic Construct
TKNHHK

SEQ ID NO: 19779 - protein, 6 aa, ARTIFICIAL SEQUENCE
  Synthetic Construct
TKNHIK

SEQ ID NO: 19780 - protein, 6 aa, ARTIFICIAL SEQUENCE
  Synthetic Construct
TKNHLK

SEQ ID NO: 19781 - protein, 6 aa, ARTIFICIAL SEQUENCE
  Synthetic Construct
TKNHNK

SEQ ID NO: 19782 - protein, 6 aa, ARTIFICIAL SEQUENCE
  Synthetic Construct
TKNHQK

SEQ ID NO: 19783 - protein, 6 aa, ARTIFICIAL SEQUENCE
  Synthetic Construct
TKNHRK

SEQ ID NO: 19784 - protein, 6 aa, ARTIFICIAL SEQUENCE
  Synthetic Construct
TKNHSK

SEQ ID NO: 19785 - protein, 6 aa, ARTIFICIAL SEQUENCE
  Synthetic Construct
TKNHTK

SEQ ID NO: 19786 - protein, 6 aa, ARTIFICIAL SEQUENCE
  Synthetic Construct
TKNHYK

SEQ ID NO: 19787 - protein, 6 aa, ARTIFICIAL SEQUENCE
  Synthetic Construct
TKNIAK

SEQ ID NO: 19788 - protein, 6 aa, ARTIFICIAL SEQUENCE
  Synthetic Construct
TKNIDK

SEQ ID NO: 19789 - protein, 6 aa, ARTIFICIAL SEQUENCE
  Synthetic Construct
TKNIEK

SEQ ID NO: 19790 - protein, 6 aa, ARTIFICIAL SEQUENCE
  Synthetic Construct
TKNIFK

SEQ ID NO: 19791 - protein, 6 aa, ARTIFICIAL SEQUENCE
  Synthetic Construct
TKNIGK

SEQ ID NO: 19792 - protein, 6 aa, ARTIFICIAL SEQUENCE
  Synthetic Construct
TKNIHK

SEQ ID NO: 19793 - protein, 6 aa, ARTIFICIAL SEQUENCE
  Synthetic Construct
TKNIIK

SEQ ID NO: 19794 - protein, 6 aa, ARTIFICIAL SEQUENCE
  Synthetic Construct
TKNILK

SEQ ID NO: 19795 - protein, 6 aa, ARTIFICIAL SEQUENCE
  Synthetic Construct
TKNINK

SEQ ID NO: 19796 - protein, 6 aa, ARTIFICIAL SEQUENCE
  Synthetic Construct
TKNIQK

SEQ ID NO: 19797 - protein, 6 aa, ARTIFICIAL SEQUENCE
  Synthetic Construct
TKNIRK

SEQ ID NO: 19798 - protein, 6 aa, ARTIFICIAL SEQUENCE
  Synthetic Construct
TKNISK

SEQ ID NO: 19799 - protein, 6 aa, ARTIFICIAL SEQUENCE
  Synthetic Construct
TKNITK

SEQ ID NO: 19800 - protein, 6 aa, ARTIFICIAL SEQUENCE
  Synthetic Construct
TKNIYK

SEQ ID NO: 19801 - protein, 6 aa, ARTIFICIAL SEQUENCE
  Synthetic Construct
TKNLAK

SEQ ID NO: 19802 - protein, 6 aa, ARTIFICIAL SEQUENCE
  Synthetic Construct
TKNLDK

SEQ ID NO: 19803 - protein, 6 aa, ARTIFICIAL SEQUENCE
  Synthetic Construct
TKNLEK

SEQ ID NO: 19804 - protein, 6 aa, ARTIFICIAL SEQUENCE
  Synthetic Construct
TKNLFK

SEQ ID NO: 19805 - protein, 6 aa, ARTIFICIAL SEQUENCE
  Synthetic Construct
TKNLGK

SEQ ID NO: 19806 - protein, 6 aa, ARTIFICIAL SEQUENCE
  Synthetic Construct
TKNLHK

SEQ ID NO: 19807 - protein, 6 aa, ARTIFICIAL SEQUENCE
  Synthetic Construct
TKNLIK

SEQ ID NO: 19808 - protein, 6 aa, ARTIFICIAL SEQUENCE
  Synthetic Construct
TKNLLK

SEQ ID NO: 19809 - protein, 6 aa, ARTIFICIAL SEQUENCE
  Synthetic Construct
TKNLNK

SEQ ID NO: 19810 - protein, 6 aa, ARTIFICIAL SEQUENCE
  Synthetic Construct
TKNLQK

SEQ ID NO: 19811 - protein, 6 aa, ARTIFICIAL SEQUENCE
  Synthetic Construct
TKNLRK

SEQ ID NO: 19812 - protein, 6 aa, ARTIFICIAL SEQUENCE
  Synthetic Construct
TKNLSK

SEQ ID NO: 19813 - protein, 6 aa, ARTIFICIAL SEQUENCE
  Synthetic Construct
TKNLTK

SEQ ID NO: 19814 - protein, 6 aa, ARTIFICIAL SEQUENCE
  Synthetic Construct
TKNLYK

SEQ ID NO: 19815 - protein, 6 aa, ARTIFICIAL SEQUENCE
  Synthetic Construct
TKNNAK

SEQ ID NO: 19816 - protein, 6 aa, ARTIFICIAL SEQUENCE
  Synthetic Construct
TKNNDK

SEQ ID NO: 19817 - protein, 6 aa, ARTIFICIAL SEQUENCE
  Synthetic Construct
TKNNEK

SEQ ID NO: 19818 - protein, 6 aa, ARTIFICIAL SEQUENCE
  Synthetic Construct
TKNNFK

SEQ ID NO: 19819 - protein, 6 aa, ARTIFICIAL SEQUENCE
  Synthetic Construct
TKNNGK

SEQ ID NO: 19820 - protein, 6 aa, ARTIFICIAL SEQUENCE
  Synthetic Construct
TKNNHK

SEQ ID NO: 19821 - protein, 6 aa, ARTIFICIAL SEQUENCE
  Synthetic Construct
TKNNIK

SEQ ID NO: 19822 - protein, 6 aa, ARTIFICIAL SEQUENCE
  Synthetic Construct
TKNNLK

SEQ ID NO: 19823 - protein, 6 aa, ARTIFICIAL SEQUENCE
  Synthetic Construct
TKNNNK

SEQ ID NO: 19824 - protein, 6 aa, ARTIFICIAL SEQUENCE
  Synthetic Construct
TKNNQK

SEQ ID NO: 19825 - protein, 6 aa, ARTIFICIAL SEQUENCE
  Synthetic Construct
TKNNRK

SEQ ID NO: 19826 - protein, 6 aa, ARTIFICIAL SEQUENCE
  Synthetic Construct
TKNNSK

SEQ ID NO: 19827 - protein, 6 aa, ARTIFICIAL SEQUENCE
  Synthetic Construct
TKNNTK

SEQ ID NO: 19828 - protein, 6 aa, ARTIFICIAL SEQUENCE
  Synthetic Construct
TKNNYK

SEQ ID NO: 19829 - protein, 6 aa, ARTIFICIAL SEQUENCE
  Synthetic Construct
TKNQAK

SEQ ID NO: 19830 - protein, 6 aa, ARTIFICIAL SEQUENCE
  Synthetic Construct
TKNQDK

SEQ ID NO: 19831 - protein, 6 aa, ARTIFICIAL SEQUENCE
  Synthetic Construct
TKNQEK

SEQ ID NO: 19832 - protein, 6 aa, ARTIFICIAL SEQUENCE
  Synthetic Construct
TKNQFK

SEQ ID NO: 19833 - protein, 6 aa, ARTIFICIAL SEQUENCE
  Synthetic Construct
TKNQGK

SEQ ID NO: 19834 - protein, 6 aa, ARTIFICIAL SEQUENCE
  Synthetic Construct
TKNQHK

SEQ ID NO: 19835 - protein, 6 aa, ARTIFICIAL SEQUENCE
  Synthetic Construct
TKNQIK

SEQ ID NO: 19836 - protein, 6 aa, ARTIFICIAL SEQUENCE
  Synthetic Construct
TKNQLK

SEQ ID NO: 19837 - protein, 6 aa, ARTIFICIAL SEQUENCE
  Synthetic Construct
TKNQNK

SEQ ID NO: 19838 - protein, 6 aa, ARTIFICIAL SEQUENCE
  Synthetic Construct
TKNQQK

SEQ ID NO: 19839 - protein, 6 aa, ARTIFICIAL SEQUENCE
  Synthetic Construct
TKNQRK

SEQ ID NO: 19840 - protein, 6 aa, ARTIFICIAL SEQUENCE
  Synthetic Construct
TKNQSK

SEQ ID NO: 19841 - protein, 6 aa, ARTIFICIAL SEQUENCE
  Synthetic Construct
TKNQTK

SEQ ID NO: 19842 - protein, 6 aa, ARTIFICIAL SEQUENCE
  Synthetic Construct
TKNQYK

SEQ ID NO: 19843 - protein, 6 aa, ARTIFICIAL SEQUENCE
  Synthetic Construct
TKNRAK

SEQ ID NO: 19844 - protein, 6 aa, ARTIFICIAL SEQUENCE
  Synthetic Construct
TKNRDK

SEQ ID NO: 19845 - protein, 6 aa, ARTIFICIAL SEQUENCE
  Synthetic Construct
TKNREK

SEQ ID NO: 19846 - protein, 6 aa, ARTIFICIAL SEQUENCE
  Synthetic Construct
TKNRFK

SEQ ID NO: 19847 - protein, 6 aa, ARTIFICIAL SEQUENCE
  Synthetic Construct
TKNRGK

SEQ ID NO: 19848 - protein, 6 aa, ARTIFICIAL SEQUENCE
  Synthetic Construct
TKNRHK

SEQ ID NO: 19849 - protein, 6 aa, ARTIFICIAL SEQUENCE
  Synthetic Construct
TKNRIK

SEQ ID NO: 19850 - protein, 6 aa, ARTIFICIAL SEQUENCE
  Synthetic Construct
TKNRLK

SEQ ID NO: 19851 - protein, 6 aa, ARTIFICIAL SEQUENCE
  Synthetic Construct
TKNRNK

SEQ ID NO: 19852 - protein, 6 aa, ARTIFICIAL SEQUENCE
  Synthetic Construct
TKNRQK

SEQ ID NO: 19853 - protein, 6 aa, ARTIFICIAL SEQUENCE
  Synthetic Construct
TKNRRK

SEQ ID NO: 19854 - protein, 6 aa, ARTIFICIAL SEQUENCE
  Synthetic Construct
TKNRSK

SEQ ID NO: 19855 - protein, 6 aa, ARTIFICIAL SEQUENCE
  Synthetic Construct
TKNRTK

SEQ ID NO: 19856 - protein, 6 aa, ARTIFICIAL SEQUENCE
  Synthetic Construct
TKNRYK

SEQ ID NO: 19857 - protein, 6 aa, ARTIFICIAL SEQUENCE
  Synthetic Construct
TKNSAK

SEQ ID NO: 19858 - protein, 6 aa, ARTIFICIAL SEQUENCE
  Synthetic Construct
TKNSDK

SEQ ID NO: 19859 - protein, 6 aa, ARTIFICIAL SEQUENCE
  Synthetic Construct
TKNSEK

SEQ ID NO: 19860 - protein, 6 aa, ARTIFICIAL SEQUENCE
  Synthetic Construct
TKNSFK

SEQ ID NO: 19861 - protein, 6 aa, ARTIFICIAL SEQUENCE
  Synthetic Construct
TKNSGK

SEQ ID NO: 19862 - protein, 6 aa, ARTIFICIAL SEQUENCE
  Synthetic Construct
TKNSHK

SEQ ID NO: 19863 - protein, 6 aa, ARTIFICIAL SEQUENCE
  Synthetic Construct
TKNSIK

SEQ ID NO: 19864 - protein, 6 aa, ARTIFICIAL SEQUENCE
  Synthetic Construct
TKNSLK

SEQ ID NO: 19865 - protein, 6 aa, ARTIFICIAL SEQUENCE
  Synthetic Construct
TKNSNK

SEQ ID NO: 19866 - protein, 6 aa, ARTIFICIAL SEQUENCE
  Synthetic Construct
TKNSQK

SEQ ID NO: 19867 - protein, 6 aa, ARTIFICIAL SEQUENCE
  Synthetic Construct
TKNSRK

SEQ ID NO: 19868 - protein, 6 aa, ARTIFICIAL SEQUENCE
  Synthetic Construct
TKNSSK

SEQ ID NO: 19869 - protein, 6 aa, ARTIFICIAL SEQUENCE
  Synthetic Construct
TKNSTK

SEQ ID NO: 19870 - protein, 6 aa, ARTIFICIAL SEQUENCE
  Synthetic Construct
TKNSYK

SEQ ID NO: 19871 - protein, 6 aa, ARTIFICIAL SEQUENCE
  Synthetic Construct
TKNTAK

SEQ ID NO: 19872 - protein, 6 aa, ARTIFICIAL SEQUENCE
  Synthetic Construct
TKNTDK

SEQ ID NO: 19873 - protein, 6 aa, ARTIFICIAL SEQUENCE
  Synthetic Construct
TKNTEK

SEQ ID NO: 19874 - protein, 6 aa, ARTIFICIAL SEQUENCE
  Synthetic Construct
TKNTFK

SEQ ID NO: 19875 - protein, 6 aa, ARTIFICIAL SEQUENCE
  Synthetic Construct
TKNTGK

SEQ ID NO: 19876 - protein, 6 aa, ARTIFICIAL SEQUENCE
  Synthetic Construct
TKNTHK

SEQ ID NO: 19877 - protein, 6 aa, ARTIFICIAL SEQUENCE
  Synthetic Construct
TKNTIK

SEQ ID NO: 19878 - protein, 6 aa, ARTIFICIAL SEQUENCE
  Synthetic Construct
TKNTLK

SEQ ID NO: 19879 - protein, 6 aa, ARTIFICIAL SEQUENCE
  Synthetic Construct
TKNTNK

SEQ ID NO: 19880 - protein, 6 aa, ARTIFICIAL SEQUENCE
  Synthetic Construct
TKNTQK

SEQ ID NO: 19881 - protein, 6 aa, ARTIFICIAL SEQUENCE
  Synthetic Construct
TKNTRK

SEQ ID NO: 19882 - protein, 6 aa, ARTIFICIAL SEQUENCE
  Synthetic Construct
TKNTSK

SEQ ID NO: 19883 - protein, 6 aa, ARTIFICIAL SEQUENCE
  Synthetic Construct
TKNTTK

SEQ ID NO: 19884 - protein, 6 aa, ARTIFICIAL SEQUENCE
  Synthetic Construct
TKNTYK

SEQ ID NO: 19885 - protein, 6 aa, ARTIFICIAL SEQUENCE
  Synthetic Construct
TKNYAK

SEQ ID NO: 19886 - protein, 6 aa, ARTIFICIAL SEQUENCE
  Synthetic Construct
TKNYDK

SEQ ID NO: 19887 - protein, 6 aa, ARTIFICIAL SEQUENCE
  Synthetic Construct
TKNYEK

SEQ ID NO: 19888 - protein, 6 aa, ARTIFICIAL SEQUENCE
  Synthetic Construct
TKNYFK

SEQ ID NO: 19889 - protein, 6 aa, ARTIFICIAL SEQUENCE
  Synthetic Construct
TKNYGK

SEQ ID NO: 19890 - protein, 6 aa, ARTIFICIAL SEQUENCE
  Synthetic Construct
TKNYHK

SEQ ID NO: 19891 - protein, 6 aa, ARTIFICIAL SEQUENCE
  Synthetic Construct
TKNYIK

SEQ ID NO: 19892 - protein, 6 aa, ARTIFICIAL SEQUENCE
  Synthetic Construct
TKNYLK

SEQ ID NO: 19893 - protein, 6 aa, ARTIFICIAL SEQUENCE
  Synthetic Construct
TKNYNK

SEQ ID NO: 19894 - protein, 6 aa, ARTIFICIAL SEQUENCE
  Synthetic Construct
TKNYQK

SEQ ID NO: 19895 - protein, 6 aa, ARTIFICIAL SEQUENCE
  Synthetic Construct
TKNYRK

SEQ ID NO: 19896 - protein, 6 aa, ARTIFICIAL SEQUENCE
  Synthetic Construct
TKNYSK

SEQ ID NO: 19897 - protein, 6 aa, ARTIFICIAL SEQUENCE
  Synthetic Construct
TKNYTK

SEQ ID NO: 19898 - protein, 6 aa, ARTIFICIAL SEQUENCE
  Synthetic Construct
TKNYYK

SEQ ID NO: 19899 - protein, 6 aa, ARTIFICIAL SEQUENCE
  Synthetic Construct
TKPAAK

SEQ ID NO: 19900 - protein, 6 aa, ARTIFICIAL SEQUENCE
  Synthetic Construct
TKPADK

SEQ ID NO: 19901 - protein, 6 aa, ARTIFICIAL SEQUENCE
  Synthetic Construct
TKPAEK

SEQ ID NO: 19902 - protein, 6 aa, ARTIFICIAL SEQUENCE
  Synthetic Construct
TKPAFK

SEQ ID NO: 19903 - protein, 6 aa, ARTIFICIAL SEQUENCE
  Synthetic Construct
TKPAGK

SEQ ID NO: 19904 - protein, 6 aa, ARTIFICIAL SEQUENCE
  Synthetic Construct
TKPAHK

SEQ ID NO: 19905 - protein, 6 aa, ARTIFICIAL SEQUENCE
  Synthetic Construct
TKPAIK

SEQ ID NO: 19906 - protein, 6 aa, ARTIFICIAL SEQUENCE
  Synthetic Construct
TKPALK

SEQ ID NO: 19907 - protein, 6 aa, ARTIFICIAL SEQUENCE
  Synthetic Construct
TKPANK

SEQ ID NO: 19908 - protein, 6 aa, ARTIFICIAL SEQUENCE
  Synthetic Construct
TKPAQK

SEQ ID NO: 19909 - protein, 6 aa, ARTIFICIAL SEQUENCE
  Synthetic Construct
TKPARK

SEQ ID NO: 19910 - protein, 6 aa, ARTIFICIAL SEQUENCE
  Synthetic Construct
TKPASK

SEQ ID NO: 19911 - protein, 6 aa, ARTIFICIAL SEQUENCE
  Synthetic Construct
TKPATK

SEQ ID NO: 19912 - protein, 6 aa, ARTIFICIAL SEQUENCE
  Synthetic Construct
TKPAYK

SEQ ID NO: 19913 - protein, 6 aa, ARTIFICIAL SEQUENCE
  Synthetic Construct
TKPDAK

SEQ ID NO: 19914 - protein, 6 aa, ARTIFICIAL SEQUENCE
  Synthetic Construct
TKPDDK

SEQ ID NO: 19915 - protein, 6 aa, ARTIFICIAL SEQUENCE
  Synthetic Construct
TKPDEK

SEQ ID NO: 19916 - protein, 6 aa, ARTIFICIAL SEQUENCE
  Synthetic Construct
TKPDFK

SEQ ID NO: 19917 - protein, 6 aa, ARTIFICIAL SEQUENCE
  Synthetic Construct
TKPDGK

SEQ ID NO: 19918 - protein, 6 aa, ARTIFICIAL SEQUENCE
  Synthetic Construct
TKPDHK

SEQ ID NO: 19919 - protein, 6 aa, ARTIFICIAL SEQUENCE
  Synthetic Construct
TKPDIK

SEQ ID NO: 19920 - protein, 6 aa, ARTIFICIAL SEQUENCE
  Synthetic Construct
TKPDLK

SEQ ID NO: 19921 - protein, 6 aa, ARTIFICIAL SEQUENCE
  Synthetic Construct
TKPDNK

SEQ ID NO: 19922 - protein, 6 aa, ARTIFICIAL SEQUENCE
  Synthetic Construct
TKPDQK

SEQ ID NO: 19923 - protein, 6 aa, ARTIFICIAL SEQUENCE
  Synthetic Construct
TKPDRK

SEQ ID NO: 19924 - protein, 6 aa, ARTIFICIAL SEQUENCE
  Synthetic Construct
TKPDSK

SEQ ID NO: 19925 - protein, 6 aa, ARTIFICIAL SEQUENCE
  Synthetic Construct
TKPDTK

SEQ ID NO: 19926 - protein, 6 aa, ARTIFICIAL SEQUENCE
  Synthetic Construct
TKPDYK

SEQ ID NO: 19927 - protein, 6 aa, ARTIFICIAL SEQUENCE
  Synthetic Construct
TKPEAK

SEQ ID NO: 19928 - protein, 6 aa, ARTIFICIAL SEQUENCE
  Synthetic Construct
TKPEDK

SEQ ID NO: 19929 - protein, 6 aa, ARTIFICIAL SEQUENCE
  Synthetic Construct
TKPEEK

SEQ ID NO: 19930 - protein, 6 aa, ARTIFICIAL SEQUENCE
  Synthetic Construct
TKPEFK

SEQ ID NO: 19931 - protein, 6 aa, ARTIFICIAL SEQUENCE
  Synthetic Construct
TKPEGK

SEQ ID NO: 19932 - protein, 6 aa, ARTIFICIAL SEQUENCE
  Synthetic Construct
TKPEHK

SEQ ID NO: 19933 - protein, 6 aa, ARTIFICIAL SEQUENCE
  Synthetic Construct
TKPEIK

SEQ ID NO: 19934 - protein, 6 aa, ARTIFICIAL SEQUENCE
  Synthetic Construct
TKPELK

SEQ ID NO: 19935 - protein, 6 aa, ARTIFICIAL SEQUENCE
  Synthetic Construct
TKPENK

SEQ ID NO: 19936 - protein, 6 aa, ARTIFICIAL SEQUENCE
  Synthetic Construct
TKPEQK

SEQ ID NO: 19937 - protein, 6 aa, ARTIFICIAL SEQUENCE
  Synthetic Construct
TKPERK

SEQ ID NO: 19938 - protein, 6 aa, ARTIFICIAL SEQUENCE
  Synthetic Construct
TKPESK

SEQ ID NO: 19939 - protein, 6 aa, ARTIFICIAL SEQUENCE
  Synthetic Construct
TKPETK

SEQ ID NO: 19940 - protein, 6 aa, ARTIFICIAL SEQUENCE
  Synthetic Construct
TKPEYK

SEQ ID NO: 19941 - protein, 6 aa, ARTIFICIAL SEQUENCE
  Synthetic Construct
TKPFAK

SEQ ID NO: 19942 - protein, 6 aa, ARTIFICIAL SEQUENCE
  Synthetic Construct
TKPFDK

SEQ ID NO: 19943 - protein, 6 aa, ARTIFICIAL SEQUENCE
  Synthetic Construct
TKPFEK

SEQ ID NO: 19944 - protein, 6 aa, ARTIFICIAL SEQUENCE
  Synthetic Construct
TKPFFK

SEQ ID NO: 19945 - protein, 6 aa, ARTIFICIAL SEQUENCE
  Synthetic Construct
TKPFGK

SEQ ID NO: 19946 - protein, 6 aa, ARTIFICIAL SEQUENCE
  Synthetic Construct
TKPFHK

SEQ ID NO: 19947 - protein, 6 aa, ARTIFICIAL SEQUENCE
  Synthetic Construct
TKPFIK

SEQ ID NO: 19948 - protein, 6 aa, ARTIFICIAL SEQUENCE
  Synthetic Construct
TKPFLK

SEQ ID NO: 19949 - protein, 6 aa, ARTIFICIAL SEQUENCE
  Synthetic Construct
TKPFNK

SEQ ID NO: 19950 - protein, 6 aa, ARTIFICIAL SEQUENCE
  Synthetic Construct
TKPFQK

SEQ ID NO: 19951 - protein, 6 aa, ARTIFICIAL SEQUENCE
  Synthetic Construct
TKPFRK

SEQ ID NO: 19952 - protein, 6 aa, ARTIFICIAL SEQUENCE
  Synthetic Construct
TKPFSK

SEQ ID NO: 19953 - protein, 6 aa, ARTIFICIAL SEQUENCE
  Synthetic Construct
TKPFTK

SEQ ID NO: 19954 - protein, 6 aa, ARTIFICIAL SEQUENCE
  Synthetic Construct
TKPFYK

SEQ ID NO: 19955 - protein, 6 aa, ARTIFICIAL SEQUENCE
  Synthetic Construct
TKPGAK

SEQ ID NO: 19956 - protein, 6 aa, ARTIFICIAL SEQUENCE
  Synthetic Construct
TKPGDK

SEQ ID NO: 19957 - protein, 6 aa, ARTIFICIAL SEQUENCE
  Synthetic Construct
TKPGEK

SEQ ID NO: 19958 - protein, 6 aa, ARTIFICIAL SEQUENCE
  Synthetic Construct
TKPGFK

SEQ ID NO: 19959 - protein, 6 aa, ARTIFICIAL SEQUENCE
  Synthetic Construct
TKPGGK

SEQ ID NO: 19960 - protein, 6 aa, ARTIFICIAL SEQUENCE
  Synthetic Construct
TKPGHK

SEQ ID NO: 19961 - protein, 6 aa, ARTIFICIAL SEQUENCE
  Synthetic Construct
TKPGIK

SEQ ID NO: 19962 - protein, 6 aa, ARTIFICIAL SEQUENCE
  Synthetic Construct
TKPGLK

SEQ ID NO: 19963 - protein, 6 aa, ARTIFICIAL SEQUENCE
  Synthetic Construct
TKPGNK

SEQ ID NO: 19964 - protein, 6 aa, ARTIFICIAL SEQUENCE
  Synthetic Construct
TKPGQK

SEQ ID NO: 19965 - protein, 6 aa, ARTIFICIAL SEQUENCE
  Synthetic Construct
TKPGRK

SEQ ID NO: 19966 - protein, 6 aa, ARTIFICIAL SEQUENCE
  Synthetic Construct
TKPGSK

SEQ ID NO: 19967 - protein, 6 aa, ARTIFICIAL SEQUENCE
  Synthetic Construct
TKPGTK

SEQ ID NO: 19968 - protein, 6 aa, ARTIFICIAL SEQUENCE
  Synthetic Construct
TKPGYK

SEQ ID NO: 19969 - protein, 6 aa, ARTIFICIAL SEQUENCE
  Synthetic Construct
TKPHAK

SEQ ID NO: 19970 - protein, 6 aa, ARTIFICIAL SEQUENCE
  Synthetic Construct
TKPHDK

SEQ ID NO: 19971 - protein, 6 aa, ARTIFICIAL SEQUENCE
  Synthetic Construct
TKPHEK

SEQ ID NO: 19972 - protein, 6 aa, ARTIFICIAL SEQUENCE
  Synthetic Construct
TKPHFK

SEQ ID NO: 19973 - protein, 6 aa, ARTIFICIAL SEQUENCE
  Synthetic Construct
TKPHGK

SEQ ID NO: 19974 - protein, 6 aa, ARTIFICIAL SEQUENCE
  Synthetic Construct
TKPHHK

SEQ ID NO: 19975 - protein, 6 aa, ARTIFICIAL SEQUENCE
  Synthetic Construct
TKPHIK

SEQ ID NO: 19976 - protein, 6 aa, ARTIFICIAL SEQUENCE
  Synthetic Construct
TKPHLK

SEQ ID NO: 19977 - protein, 6 aa, ARTIFICIAL SEQUENCE
  Synthetic Construct
TKPHNK

SEQ ID NO: 19978 - protein, 6 aa, ARTIFICIAL SEQUENCE
  Synthetic Construct
TKPHQK

SEQ ID NO: 19979 - protein, 6 aa, ARTIFICIAL SEQUENCE
  Synthetic Construct
TKPHRK

SEQ ID NO: 19980 - protein, 6 aa, ARTIFICIAL SEQUENCE
  Synthetic Construct
TKPHSK

SEQ ID NO: 19981 - protein, 6 aa, ARTIFICIAL SEQUENCE
  Synthetic Construct
TKPHTK

SEQ ID NO: 19982 - protein, 6 aa, ARTIFICIAL SEQUENCE
  Synthetic Construct
TKPHYK

SEQ ID NO: 19983 - protein, 6 aa, ARTIFICIAL SEQUENCE
  Synthetic Construct
TKPIAK

SEQ ID NO: 19984 - protein, 6 aa, ARTIFICIAL SEQUENCE
  Synthetic Construct
TKPIDK

SEQ ID NO: 19985 - protein, 6 aa, ARTIFICIAL SEQUENCE
  Synthetic Construct
TKPIEK

SEQ ID NO: 19986 - protein, 6 aa, ARTIFICIAL SEQUENCE
  Synthetic Construct
TKPIFK

SEQ ID NO: 19987 - protein, 6 aa, ARTIFICIAL SEQUENCE
  Synthetic Construct
TKPIGK

SEQ ID NO: 19988 - protein, 6 aa, ARTIFICIAL SEQUENCE
  Synthetic Construct
TKPIHK

SEQ ID NO: 19989 - protein, 6 aa, ARTIFICIAL SEQUENCE
  Synthetic Construct
TKPIIK

SEQ ID NO: 19990 - protein, 6 aa, ARTIFICIAL SEQUENCE
  Synthetic Construct
TKPILK

SEQ ID NO: 19991 - protein, 6 aa, ARTIFICIAL SEQUENCE
  Synthetic Construct
TKPINK

SEQ ID NO: 19992 - protein, 6 aa, ARTIFICIAL SEQUENCE
  Synthetic Construct
TKPIQK

SEQ ID NO: 19993 - protein, 6 aa, ARTIFICIAL SEQUENCE
  Synthetic Construct
TKPIRK

SEQ ID NO: 19994 - protein, 6 aa, ARTIFICIAL SEQUENCE
  Synthetic Construct
TKPISK

SEQ ID NO: 19995 - protein, 6 aa, ARTIFICIAL SEQUENCE
  Synthetic Construct
TKPITK

SEQ ID NO: 19996 - protein, 6 aa, ARTIFICIAL SEQUENCE
  Synthetic Construct
TKPIYK

SEQ ID NO: 19997 - protein, 6 aa, ARTIFICIAL SEQUENCE
  Synthetic Construct
TKPLAK

SEQ ID NO: 19998 - protein, 6 aa, ARTIFICIAL SEQUENCE
  Synthetic Construct
TKPLDK

SEQ ID NO: 19999 - protein, 6 aa, ARTIFICIAL SEQUENCE
  Synthetic Construct
TKPLEK

SEQ ID NO: 20000 - protein, 6 aa, ARTIFICIAL SEQUENCE
  Synthetic Construct
TKPLFK

SEQ ID NO: 20001 - protein, 6 aa, ARTIFICIAL SEQUENCE
  Synthetic Construct
TKPLGK

SEQ ID NO: 20002 - protein, 6 aa, ARTIFICIAL SEQUENCE
  Synthetic Construct
TKPLHK

SEQ ID NO: 20003 - protein, 6 aa, ARTIFICIAL SEQUENCE
  Synthetic Construct
TKPLIK

SEQ ID NO: 20004 - protein, 6 aa, ARTIFICIAL SEQUENCE
  Synthetic Construct
TKPLLK

SEQ ID NO: 20005 - protein, 6 aa, ARTIFICIAL SEQUENCE
  Synthetic Construct
TKPLNK

SEQ ID NO: 20006 - protein, 6 aa, ARTIFICIAL SEQUENCE
  Synthetic Construct
TKPLQK

SEQ ID NO: 20007 - protein, 6 aa, ARTIFICIAL SEQUENCE
  Synthetic Construct
TKPLRK

SEQ ID NO: 20008 - protein, 6 aa, ARTIFICIAL SEQUENCE
  Synthetic Construct
TKPLSK

SEQ ID NO: 20009 - protein, 6 aa, ARTIFICIAL SEQUENCE
  Synthetic Construct
TKPLTK

SEQ ID NO: 20010 - protein, 6 aa, ARTIFICIAL SEQUENCE
  Synthetic Construct
TKPLYK

SEQ ID NO: 20011 - protein, 6 aa, ARTIFICIAL SEQUENCE
  Synthetic Construct
TKPNAK

SEQ ID NO: 20012 - protein, 6 aa, ARTIFICIAL SEQUENCE
  Synthetic Construct
TKPNDK

SEQ ID NO: 20013 - protein, 6 aa, ARTIFICIAL SEQUENCE
  Synthetic Construct
TKPNEK

SEQ ID NO: 20014 - protein, 6 aa, ARTIFICIAL SEQUENCE
  Synthetic Construct
TKPNFK

SEQ ID NO: 20015 - protein, 6 aa, ARTIFICIAL SEQUENCE
  Synthetic Construct
TKPNGK

SEQ ID NO: 20016 - protein, 6 aa, ARTIFICIAL SEQUENCE
  Synthetic Construct
TKPNHK

SEQ ID NO: 20017 - protein, 6 aa, ARTIFICIAL SEQUENCE
  Synthetic Construct
TKPNIK

SEQ ID NO: 20018 - protein, 6 aa, ARTIFICIAL SEQUENCE
  Synthetic Construct
TKPNLK

SEQ ID NO: 20019 - protein, 6 aa, ARTIFICIAL SEQUENCE
  Synthetic Construct
TKPNNK

SEQ ID NO: 20020 - protein, 6 aa, ARTIFICIAL SEQUENCE
  Synthetic Construct
TKPNQK

SEQ ID NO: 20021 - protein, 6 aa, ARTIFICIAL SEQUENCE
  Synthetic Construct
TKPNRK

SEQ ID NO: 20022 - protein, 6 aa, ARTIFICIAL SEQUENCE
  Synthetic Construct
TKPNSK

SEQ ID NO: 20023 - protein, 6 aa, ARTIFICIAL SEQUENCE
  Synthetic Construct
TKPNTK

SEQ ID NO: 20024 - protein, 6 aa, ARTIFICIAL SEQUENCE
  Synthetic Construct
TKPNYK

SEQ ID NO: 20025 - protein, 6 aa, ARTIFICIAL SEQUENCE
  Synthetic Construct
TKPQAK

SEQ ID NO: 20026 - protein, 6 aa, ARTIFICIAL SEQUENCE
  Synthetic Construct
TKPQDK

SEQ ID NO: 20027 - protein, 6 aa, ARTIFICIAL SEQUENCE
  Synthetic Construct
TKPQEK

SEQ ID NO: 20028 - protein, 6 aa, ARTIFICIAL SEQUENCE
  Synthetic Construct
TKPQFK

SEQ ID NO: 20029 - protein, 6 aa, ARTIFICIAL SEQUENCE
  Synthetic Construct
TKPQGK

SEQ ID NO: 20030 - protein, 6 aa, ARTIFICIAL SEQUENCE
  Synthetic Construct
TKPQHK

SEQ ID NO: 20031 - protein, 6 aa, ARTIFICIAL SEQUENCE
  Synthetic Construct
TKPQIK

SEQ ID NO: 20032 - protein, 6 aa, ARTIFICIAL SEQUENCE
  Synthetic Construct
TKPQLK

SEQ ID NO: 20033 - protein, 6 aa, ARTIFICIAL SEQUENCE
  Synthetic Construct
TKPQNK

SEQ ID NO: 20034 - protein, 6 aa, ARTIFICIAL SEQUENCE
  Synthetic Construct
TKPQQK

SEQ ID NO: 20035 - protein, 6 aa, ARTIFICIAL SEQUENCE
  Synthetic Construct
TKPQRK

SEQ ID NO: 20036 - protein, 6 aa, ARTIFICIAL SEQUENCE
  Synthetic Construct
TKPQSK

SEQ ID NO: 20037 - protein, 6 aa, ARTIFICIAL SEQUENCE
  Synthetic Construct
TKPQTK

SEQ ID NO: 20038 - protein, 6 aa, ARTIFICIAL SEQUENCE
  Synthetic Construct
TKPQYK

SEQ ID NO: 20039 - protein, 6 aa, ARTIFICIAL SEQUENCE
  Synthetic Construct
TKPRAK

SEQ ID NO: 20040 - protein, 6 aa, ARTIFICIAL SEQUENCE
  Synthetic Construct
TKPRDK

SEQ ID NO: 20041 - protein, 6 aa, ARTIFICIAL SEQUENCE
  Synthetic Construct
TKPREK

SEQ ID NO: 20042 - protein, 6 aa, ARTIFICIAL SEQUENCE
  Synthetic Construct
TKPRFK

SEQ ID NO: 20043 - protein, 6 aa, ARTIFICIAL SEQUENCE
  Synthetic Construct
TKPRGK

SEQ ID NO: 20044 - protein, 6 aa, ARTIFICIAL SEQUENCE
  Synthetic Construct
TKPRHK

SEQ ID NO: 20045 - protein, 6 aa, ARTIFICIAL SEQUENCE
  Synthetic Construct
TKPRIK

SEQ ID NO: 20046 - protein, 6 aa, ARTIFICIAL SEQUENCE
  Synthetic Construct
TKPRLK

SEQ ID NO: 20047 - protein, 6 aa, ARTIFICIAL SEQUENCE
  Synthetic Construct
TKPRNK

SEQ ID NO: 20048 - protein, 6 aa, ARTIFICIAL SEQUENCE
  Synthetic Construct
TKPRQK

SEQ ID NO: 20049 - protein, 6 aa, ARTIFICIAL SEQUENCE
  Synthetic Construct
TKPRRK

SEQ ID NO: 20050 - protein, 6 aa, ARTIFICIAL SEQUENCE
  Synthetic Construct
TKPRSK

SEQ ID NO: 20051 - protein, 6 aa, ARTIFICIAL SEQUENCE
  Synthetic Construct
TKPRTK

SEQ ID NO: 20052 - protein, 6 aa, ARTIFICIAL SEQUENCE
  Synthetic Construct
TKPRYK

SEQ ID NO: 20053 - protein, 6 aa, ARTIFICIAL SEQUENCE
  Synthetic Construct
TKPSAK

SEQ ID NO: 20054 - protein, 6 aa, ARTIFICIAL SEQUENCE
  Synthetic Construct
TKPSDK

SEQ ID NO: 20055 - protein, 6 aa, ARTIFICIAL SEQUENCE
  Synthetic Construct
TKPSEK

SEQ ID NO: 20056 - protein, 6 aa, ARTIFICIAL SEQUENCE
  Synthetic Construct
TKPSFK

SEQ ID NO: 20057 - protein, 6 aa, ARTIFICIAL SEQUENCE
  Synthetic Construct
TKPSGK

SEQ ID NO: 20058 - protein, 6 aa, ARTIFICIAL SEQUENCE
  Synthetic Construct
TKPSHK

SEQ ID NO: 20059 - protein, 6 aa, ARTIFICIAL SEQUENCE
  Synthetic Construct
TKPSIK

SEQ ID NO: 20060 - protein, 6 aa, ARTIFICIAL SEQUENCE
  Synthetic Construct
TKPSLK

SEQ ID NO: 20061 - protein, 6 aa, ARTIFICIAL SEQUENCE
  Synthetic Construct
TKPSNK

SEQ ID NO: 20062 - protein, 6 aa, ARTIFICIAL SEQUENCE
  Synthetic Construct
TKPSQK

SEQ ID NO: 20063 - protein, 6 aa, ARTIFICIAL SEQUENCE
  Synthetic Construct
TKPSRK

SEQ ID NO: 20064 - protein, 6 aa, ARTIFICIAL SEQUENCE
  Synthetic Construct
TKPSSK

SEQ ID NO: 20065 - protein, 6 aa, ARTIFICIAL SEQUENCE
  Synthetic Construct
TKPSTK

SEQ ID NO: 20066 - protein, 6 aa, ARTIFICIAL SEQUENCE
  Synthetic Construct
TKPSYK

SEQ ID NO: 20067 - protein, 6 aa, ARTIFICIAL SEQUENCE
  Synthetic Construct
TKPTAK

SEQ ID NO: 20068 - protein, 6 aa, ARTIFICIAL SEQUENCE
  Synthetic Construct
TKPTDK

SEQ ID NO: 20069 - protein, 6 aa, ARTIFICIAL SEQUENCE
  Synthetic Construct
TKPTEK

SEQ ID NO: 20070 - protein, 6 aa, ARTIFICIAL SEQUENCE
  Synthetic Construct
TKPTFK

SEQ ID NO: 20071 - protein, 6 aa, ARTIFICIAL SEQUENCE
  Synthetic Construct
TKPTGK

SEQ ID NO: 20072 - protein, 6 aa, ARTIFICIAL SEQUENCE
  Synthetic Construct
TKPTHK

SEQ ID NO: 20073 - protein, 6 aa, ARTIFICIAL SEQUENCE
  Synthetic Construct
TKPTIK

SEQ ID NO: 20074 - protein, 6 aa, ARTIFICIAL SEQUENCE
  Synthetic Construct
TKPTLK

SEQ ID NO: 20075 - protein, 6 aa, ARTIFICIAL SEQUENCE
  Synthetic Construct
TKPTNK

SEQ ID NO: 20076 - protein, 6 aa, ARTIFICIAL SEQUENCE
  Synthetic Construct
TKPTQK

SEQ ID NO: 20077 - protein, 6 aa, ARTIFICIAL SEQUENCE
  Synthetic Construct
TKPTRK

SEQ ID NO: 20078 - protein, 6 aa, ARTIFICIAL SEQUENCE
  Synthetic Construct
TKPTSK

SEQ ID NO: 20079 - protein, 6 aa, ARTIFICIAL SEQUENCE
  Synthetic Construct
TKPTTK

SEQ ID NO: 20080 - protein, 6 aa, ARTIFICIAL SEQUENCE
  Synthetic Construct
TKPTYK

SEQ ID NO: 20081 - protein, 6 aa, ARTIFICIAL SEQUENCE
  Synthetic Construct
TKPYAK

SEQ ID NO: 20082 - protein, 6 aa, ARTIFICIAL SEQUENCE
  Synthetic Construct
TKPYDK

SEQ ID NO: 20083 - protein, 6 aa, ARTIFICIAL SEQUENCE
  Synthetic Construct
TKPYEK

SEQ ID NO: 20084 - protein, 6 aa, ARTIFICIAL SEQUENCE
  Synthetic Construct
TKPYFK

SEQ ID NO: 20085 - protein, 6 aa, ARTIFICIAL SEQUENCE
  Synthetic Construct
TKPYGK

SEQ ID NO: 20086 - protein, 6 aa, ARTIFICIAL SEQUENCE
  Synthetic Construct
TKPYHK

SEQ ID NO: 20087 - protein, 6 aa, ARTIFICIAL SEQUENCE
  Synthetic Construct
TKPYIK

SEQ ID NO: 20088 - protein, 6 aa, ARTIFICIAL SEQUENCE
  Synthetic Construct
TKPYLK

SEQ ID NO: 20089 - protein, 6 aa, ARTIFICIAL SEQUENCE
  Synthetic Construct
TKPYNK

SEQ ID NO: 20090 - protein, 6 aa, ARTIFICIAL SEQUENCE
  Synthetic Construct
TKPYQK

SEQ ID NO: 20091 - protein, 6 aa, ARTIFICIAL SEQUENCE
  Synthetic Construct
TKPYRK

SEQ ID NO: 20092 - protein, 6 aa, ARTIFICIAL SEQUENCE
  Synthetic Construct
TKPYSK

SEQ ID NO: 20093 - protein, 6 aa, ARTIFICIAL SEQUENCE
  Synthetic Construct
TKPYTK

SEQ ID NO: 20094 - protein, 6 aa, ARTIFICIAL SEQUENCE
  Synthetic Construct
TKPYYK

SEQ ID NO: 20095 - protein, 6 aa, ARTIFICIAL SEQUENCE
  Synthetic Construct
TKQAAK

SEQ ID NO: 20096 - protein, 6 aa, ARTIFICIAL SEQUENCE
  Synthetic Construct
TKQADK

SEQ ID NO: 20097 - protein, 6 aa, ARTIFICIAL SEQUENCE
  Synthetic Construct
TKQAEK

SEQ ID NO: 20098 - protein, 6 aa, ARTIFICIAL SEQUENCE
  Synthetic Construct
TKQAFK

SEQ ID NO: 20099 - protein, 6 aa, ARTIFICIAL SEQUENCE
  Synthetic Construct
TKQAGK

SEQ ID NO: 20100 - protein, 6 aa, ARTIFICIAL SEQUENCE
  Synthetic Construct
TKQAHK

SEQ ID NO: 20101 - protein, 6 aa, ARTIFICIAL SEQUENCE
  Synthetic Construct
TKQAIK

SEQ ID NO: 20102 - protein, 6 aa, ARTIFICIAL SEQUENCE
  Synthetic Construct
TKQALK

SEQ ID NO: 20103 - protein, 6 aa, ARTIFICIAL SEQUENCE
  Synthetic Construct
TKQANK

SEQ ID NO: 20104 - protein, 6 aa, ARTIFICIAL SEQUENCE
  Synthetic Construct
TKQAQK

SEQ ID NO: 20105 - protein, 6 aa, ARTIFICIAL SEQUENCE
  Synthetic Construct
TKQARK

SEQ ID NO: 20106 - protein, 6 aa, ARTIFICIAL SEQUENCE
  Synthetic Construct
TKQASK

SEQ ID NO: 20107 - protein, 6 aa, ARTIFICIAL SEQUENCE
  Synthetic Construct
TKQATK

SEQ ID NO: 20108 - protein, 6 aa, ARTIFICIAL SEQUENCE
  Synthetic Construct
TKQAYK

SEQ ID NO: 20109 - protein, 6 aa, ARTIFICIAL SEQUENCE
  Synthetic Construct
TKQDAK

SEQ ID NO: 20110 - protein, 6 aa, ARTIFICIAL SEQUENCE
  Synthetic Construct
TKQDDK

SEQ ID NO: 20111 - protein, 6 aa, ARTIFICIAL SEQUENCE
  Synthetic Construct
TKQDEK

SEQ ID NO: 20112 - protein, 6 aa, ARTIFICIAL SEQUENCE
  Synthetic Construct
TKQDFK

SEQ ID NO: 20113 - protein, 6 aa, ARTIFICIAL SEQUENCE
  Synthetic Construct
TKQDGK

SEQ ID NO: 20114 - protein, 6 aa, ARTIFICIAL SEQUENCE
  Synthetic Construct
TKQDHK

SEQ ID NO: 20115 - protein, 6 aa, ARTIFICIAL SEQUENCE
  Synthetic Construct
TKQDIK

SEQ ID NO: 20116 - protein, 6 aa, ARTIFICIAL SEQUENCE
  Synthetic Construct
TKQDLK

SEQ ID NO: 20117 - protein, 6 aa, ARTIFICIAL SEQUENCE
  Synthetic Construct
TKQDNK

SEQ ID NO: 20118 - protein, 6 aa, ARTIFICIAL SEQUENCE
  Synthetic Construct
TKQDQK

SEQ ID NO: 20119 - protein, 6 aa, ARTIFICIAL SEQUENCE
  Synthetic Construct
TKQDRK

SEQ ID NO: 20120 - protein, 6 aa, ARTIFICIAL SEQUENCE
  Synthetic Construct
TKQDSK

SEQ ID NO: 20121 - protein, 6 aa, ARTIFICIAL SEQUENCE
  Synthetic Construct
TKQDTK

SEQ ID NO: 20122 - protein, 6 aa, ARTIFICIAL SEQUENCE
  Synthetic Construct
TKQDYK

SEQ ID NO: 20123 - protein, 6 aa, ARTIFICIAL SEQUENCE
  Synthetic Construct
TKQEAK

SEQ ID NO: 20124 - protein, 6 aa, ARTIFICIAL SEQUENCE
  Synthetic Construct
TKQEDK

SEQ ID NO: 20125 - protein, 6 aa, ARTIFICIAL SEQUENCE
  Synthetic Construct
TKQEEK

SEQ ID NO: 20126 - protein, 6 aa, ARTIFICIAL SEQUENCE
  Synthetic Construct
TKQEFK

SEQ ID NO: 20127 - protein, 6 aa, ARTIFICIAL SEQUENCE
  Synthetic Construct
TKQEGK

SEQ ID NO: 20128 - protein, 6 aa, ARTIFICIAL SEQUENCE
  Synthetic Construct
TKQEHK

SEQ ID NO: 20129 - protein, 6 aa, ARTIFICIAL SEQUENCE
  Synthetic Construct
TKQEIK

SEQ ID NO: 20130 - protein, 6 aa, ARTIFICIAL SEQUENCE
  Synthetic Construct
TKQELK

SEQ ID NO: 20131 - protein, 6 aa, ARTIFICIAL SEQUENCE
  Synthetic Construct
TKQENK

SEQ ID NO: 20132 - protein, 6 aa, ARTIFICIAL SEQUENCE
  Synthetic Construct
TKQEQK

SEQ ID NO: 20133 - protein, 6 aa, ARTIFICIAL SEQUENCE
  Synthetic Construct
TKQERK

SEQ ID NO: 20134 - protein, 6 aa, ARTIFICIAL SEQUENCE
  Synthetic Construct
TKQESK

SEQ ID NO: 20135 - protein, 6 aa, ARTIFICIAL SEQUENCE
  Synthetic Construct
TKQETK

SEQ ID NO: 20136 - protein, 6 aa, ARTIFICIAL SEQUENCE
  Synthetic Construct
TKQEYK

SEQ ID NO: 20137 - protein, 6 aa, ARTIFICIAL SEQUENCE
  Synthetic Construct
TKQFAK

SEQ ID NO: 20138 - protein, 6 aa, ARTIFICIAL SEQUENCE
  Synthetic Construct
TKQFDK

SEQ ID NO: 20139 - protein, 6 aa, ARTIFICIAL SEQUENCE
  Synthetic Construct
TKQFEK

SEQ ID NO: 20140 - protein, 6 aa, ARTIFICIAL SEQUENCE
  Synthetic Construct
TKQFFK

SEQ ID NO: 20141 - protein, 6 aa, ARTIFICIAL SEQUENCE
  Synthetic Construct
TKQFGK

SEQ ID NO: 20142 - protein, 6 aa, ARTIFICIAL SEQUENCE
  Synthetic Construct
TKQFHK

SEQ ID NO: 20143 - protein, 6 aa, ARTIFICIAL SEQUENCE
  Synthetic Construct
TKQFIK

SEQ ID NO: 20144 - protein, 6 aa, ARTIFICIAL SEQUENCE
  Synthetic Construct
TKQFLK

SEQ ID NO: 20145 - protein, 6 aa, ARTIFICIAL SEQUENCE
  Synthetic Construct
TKQFNK

SEQ ID NO: 20146 - protein, 6 aa, ARTIFICIAL SEQUENCE
  Synthetic Construct
TKQFQK

SEQ ID NO: 20147 - protein, 6 aa, ARTIFICIAL SEQUENCE
  Synthetic Construct
TKQFRK

SEQ ID NO: 20148 - protein, 6 aa, ARTIFICIAL SEQUENCE
  Synthetic Construct
TKQFSK

SEQ ID NO: 20149 - protein, 6 aa, ARTIFICIAL SEQUENCE
  Synthetic Construct
TKQFTK

SEQ ID NO: 20150 - protein, 6 aa, ARTIFICIAL SEQUENCE
  Synthetic Construct
TKQFYK

SEQ ID NO: 20151 - protein, 6 aa, ARTIFICIAL SEQUENCE
  Synthetic Construct
TKQGAK

SEQ ID NO: 20152 - protein, 6 aa, ARTIFICIAL SEQUENCE
  Synthetic Construct
TKQGDK

SEQ ID NO: 20153 - protein, 6 aa, ARTIFICIAL SEQUENCE
  Synthetic Construct
TKQGEK

SEQ ID NO: 20154 - protein, 6 aa, ARTIFICIAL SEQUENCE
  Synthetic Construct
TKQGFK

SEQ ID NO: 20155 - protein, 6 aa, ARTIFICIAL SEQUENCE
  Synthetic Construct
TKQGGK

SEQ ID NO: 20156 - protein, 6 aa, ARTIFICIAL SEQUENCE
  Synthetic Construct
TKQGHK

SEQ ID NO: 20157 - protein, 6 aa, ARTIFICIAL SEQUENCE
  Synthetic Construct
TKQGIK

SEQ ID NO: 20158 - protein, 6 aa, ARTIFICIAL SEQUENCE
  Synthetic Construct
TKQGLK

SEQ ID NO: 20159 - protein, 6 aa, ARTIFICIAL SEQUENCE
  Synthetic Construct
TKQGNK

SEQ ID NO: 20160 - protein, 6 aa, ARTIFICIAL SEQUENCE
  Synthetic Construct
TKQGQK

SEQ ID NO: 20161 - protein, 6 aa, ARTIFICIAL SEQUENCE
  Synthetic Construct
TKQGRK

SEQ ID NO: 20162 - protein, 6 aa, ARTIFICIAL SEQUENCE
  Synthetic Construct
TKQGSK

SEQ ID NO: 20163 - protein, 6 aa, ARTIFICIAL SEQUENCE
  Synthetic Construct
TKQGTK

SEQ ID NO: 20164 - protein, 6 aa, ARTIFICIAL SEQUENCE
  Synthetic Construct
TKQGYK

SEQ ID NO: 20165 - protein, 6 aa, ARTIFICIAL SEQUENCE
  Synthetic Construct
TKQHAK

SEQ ID NO: 20166 - protein, 6 aa, ARTIFICIAL SEQUENCE
  Synthetic Construct
TKQHDK

SEQ ID NO: 20167 - protein, 6 aa, ARTIFICIAL SEQUENCE
  Synthetic Construct
TKQHEK

SEQ ID NO: 20168 - protein, 6 aa, ARTIFICIAL SEQUENCE
  Synthetic Construct
TKQHFK

SEQ ID NO: 20169 - protein, 6 aa, ARTIFICIAL SEQUENCE
  Synthetic Construct
TKQHGK

SEQ ID NO: 20170 - protein, 6 aa, ARTIFICIAL SEQUENCE
  Synthetic Construct
TKQHHK

SEQ ID NO: 20171 - protein, 6 aa, ARTIFICIAL SEQUENCE
  Synthetic Construct
TKQHIK

SEQ ID NO: 20172 - protein, 6 aa, ARTIFICIAL SEQUENCE
  Synthetic Construct
TKQHLK

SEQ ID NO: 20173 - protein, 6 aa, ARTIFICIAL SEQUENCE
  Synthetic Construct
TKQHNK

SEQ ID NO: 20174 - protein, 6 aa, ARTIFICIAL SEQUENCE
  Synthetic Construct
TKQHQK

SEQ ID NO: 20175 - protein, 6 aa, ARTIFICIAL SEQUENCE
  Synthetic Construct
TKQHRK

SEQ ID NO: 20176 - protein, 6 aa, ARTIFICIAL SEQUENCE
  Synthetic Construct
TKQHSK

SEQ ID NO: 20177 - protein, 6 aa, ARTIFICIAL SEQUENCE
  Synthetic Construct
TKQHTK

SEQ ID NO: 20178 - protein, 6 aa, ARTIFICIAL SEQUENCE
  Synthetic Construct
TKQHYK

SEQ ID NO: 20179 - protein, 6 aa, ARTIFICIAL SEQUENCE
  Synthetic Construct
TKQIAK

SEQ ID NO: 20180 - protein, 6 aa, ARTIFICIAL SEQUENCE
  Synthetic Construct
TKQIDK

SEQ ID NO: 20181 - protein, 6 aa, ARTIFICIAL SEQUENCE
  Synthetic Construct
TKQIEK

SEQ ID NO: 20182 - protein, 6 aa, ARTIFICIAL SEQUENCE
  Synthetic Construct
TKQIFK

SEQ ID NO: 20183 - protein, 6 aa, ARTIFICIAL SEQUENCE
  Synthetic Construct
TKQIGK

SEQ ID NO: 20184 - protein, 6 aa, ARTIFICIAL SEQUENCE
  Synthetic Construct
TKQIHK

SEQ ID NO: 20185 - protein, 6 aa, ARTIFICIAL SEQUENCE
  Synthetic Construct
TKQIIK

SEQ ID NO: 20186 - protein, 6 aa, ARTIFICIAL SEQUENCE
  Synthetic Construct
TKQILK

SEQ ID NO: 20187 - protein, 6 aa, ARTIFICIAL SEQUENCE
  Synthetic Construct
TKQINK

SEQ ID NO: 20188 - protein, 6 aa, ARTIFICIAL SEQUENCE
  Synthetic Construct
TKQIQK

SEQ ID NO: 20189 - protein, 6 aa, ARTIFICIAL SEQUENCE
  Synthetic Construct
TKQIRK

SEQ ID NO: 20190 - protein, 6 aa, ARTIFICIAL SEQUENCE
  Synthetic Construct
TKQISK

SEQ ID NO: 20191 - protein, 6 aa, ARTIFICIAL SEQUENCE
  Synthetic Construct
TKQITK

SEQ ID NO: 20192 - protein, 6 aa, ARTIFICIAL SEQUENCE
  Synthetic Construct
TKQIYK

SEQ ID NO: 20193 - protein, 6 aa, ARTIFICIAL SEQUENCE
  Synthetic Construct
TKQLAK

SEQ ID NO: 20194 - protein, 6 aa, ARTIFICIAL SEQUENCE
  Synthetic Construct
TKQLDK

SEQ ID NO: 20195 - protein, 6 aa, ARTIFICIAL SEQUENCE
  Synthetic Construct
TKQLEK

SEQ ID NO: 20196 - protein, 6 aa, ARTIFICIAL SEQUENCE
  Synthetic Construct
TKQLFK

SEQ ID NO: 20197 - protein, 6 aa, ARTIFICIAL SEQUENCE
  Synthetic Construct
TKQLGK

SEQ ID NO: 20198 - protein, 6 aa, ARTIFICIAL SEQUENCE
  Synthetic Construct
TKQLHK

SEQ ID NO: 20199 - protein, 6 aa, ARTIFICIAL SEQUENCE
  Synthetic Construct
TKQLIK

SEQ ID NO: 20200 - protein, 6 aa, ARTIFICIAL SEQUENCE
  Synthetic Construct
TKQLLK

SEQ ID NO: 20201 - protein, 6 aa, ARTIFICIAL SEQUENCE
  Synthetic Construct
TKQLNK

SEQ ID NO: 20202 - protein, 6 aa, ARTIFICIAL SEQUENCE
  Synthetic Construct
TKQLQK

SEQ ID NO: 20203 - protein, 6 aa, ARTIFICIAL SEQUENCE
  Synthetic Construct
TKQLRK

SEQ ID NO: 20204 - protein, 6 aa, ARTIFICIAL SEQUENCE
  Synthetic Construct
TKQLSK

SEQ ID NO: 20205 - protein, 6 aa, ARTIFICIAL SEQUENCE
  Synthetic Construct
TKQLTK

SEQ ID NO: 20206 - protein, 6 aa, ARTIFICIAL SEQUENCE
  Synthetic Construct
TKQLYK

SEQ ID NO: 20207 - protein, 6 aa, ARTIFICIAL SEQUENCE
  Synthetic Construct
TKQNAK

SEQ ID NO: 20208 - protein, 6 aa, ARTIFICIAL SEQUENCE
  Synthetic Construct
TKQNDK

SEQ ID NO: 20209 - protein, 6 aa, ARTIFICIAL SEQUENCE
  Synthetic Construct
TKQNEK

SEQ ID NO: 20210 - protein, 6 aa, ARTIFICIAL SEQUENCE
  Synthetic Construct
TKQNFK

SEQ ID NO: 20211 - protein, 6 aa, ARTIFICIAL SEQUENCE
  Synthetic Construct
TKQNGK

SEQ ID NO: 20212 - protein, 6 aa, ARTIFICIAL SEQUENCE
  Synthetic Construct
TKQNHK

SEQ ID NO: 20213 - protein, 6 aa, ARTIFICIAL SEQUENCE
  Synthetic Construct
TKQNIK

SEQ ID NO: 20214 - protein, 6 aa, ARTIFICIAL SEQUENCE
  Synthetic Construct
TKQNLK

SEQ ID NO: 20215 - protein, 6 aa, ARTIFICIAL SEQUENCE
  Synthetic Construct
TKQNNK

SEQ ID NO: 20216 - protein, 6 aa, ARTIFICIAL SEQUENCE
  Synthetic Construct
TKQNQK

SEQ ID NO: 20217 - protein, 6 aa, ARTIFICIAL SEQUENCE
  Synthetic Construct
TKQNRK

SEQ ID NO: 20218 - protein, 6 aa, ARTIFICIAL SEQUENCE
  Synthetic Construct
TKQNSK

SEQ ID NO: 20219 - protein, 6 aa, ARTIFICIAL SEQUENCE
  Synthetic Construct
TKQNTK

SEQ ID NO: 20220 - protein, 6 aa, ARTIFICIAL SEQUENCE
  Synthetic Construct
TKQNYK

SEQ ID NO: 20221 - protein, 6 aa, ARTIFICIAL SEQUENCE
  Synthetic Construct
TKQQAK

SEQ ID NO: 20222 - protein, 6 aa, ARTIFICIAL SEQUENCE
  Synthetic Construct
TKQQDK

SEQ ID NO: 20223 - protein, 6 aa, ARTIFICIAL SEQUENCE
  Synthetic Construct
TKQQEK

SEQ ID NO: 20224 - protein, 6 aa, ARTIFICIAL SEQUENCE
  Synthetic Construct
TKQQFK

SEQ ID NO: 20225 - protein, 6 aa, ARTIFICIAL SEQUENCE
  Synthetic Construct
TKQQGK

SEQ ID NO: 20226 - protein, 6 aa, ARTIFICIAL SEQUENCE
  Synthetic Construct
TKQQHK

SEQ ID NO: 20227 - protein, 6 aa, ARTIFICIAL SEQUENCE
  Synthetic Construct
TKQQIK

SEQ ID NO: 20228 - protein, 6 aa, ARTIFICIAL SEQUENCE
  Synthetic Construct
TKQQLK

SEQ ID NO: 20229 - protein, 6 aa, ARTIFICIAL SEQUENCE
  Synthetic Construct
TKQQNK

SEQ ID NO: 20230 - protein, 6 aa, ARTIFICIAL SEQUENCE
  Synthetic Construct
TKQQQK

SEQ ID NO: 20231 - protein, 6 aa, ARTIFICIAL SEQUENCE
  Synthetic Construct
TKQQRK

SEQ ID NO: 20232 - protein, 6 aa, ARTIFICIAL SEQUENCE
  Synthetic Construct
TKQQSK

SEQ ID NO: 20233 - protein, 6 aa, ARTIFICIAL SEQUENCE
  Synthetic Construct
TKQQTK

SEQ ID NO: 20234 - protein, 6 aa, ARTIFICIAL SEQUENCE
  Synthetic Construct
TKQQYK

SEQ ID NO: 20235 - protein, 6 aa, ARTIFICIAL SEQUENCE
  Synthetic Construct
TKQRAK

SEQ ID NO: 20236 - protein, 6 aa, ARTIFICIAL SEQUENCE
  Synthetic Construct
TKQRDK

SEQ ID NO: 20237 - protein, 6 aa, ARTIFICIAL SEQUENCE
  Synthetic Construct
TKQREK

SEQ ID NO: 20238 - protein, 6 aa, ARTIFICIAL SEQUENCE
  Synthetic Construct
TKQRFK

SEQ ID NO: 20239 - protein, 6 aa, ARTIFICIAL SEQUENCE
  Synthetic Construct
TKQRGK

SEQ ID NO: 20240 - protein, 6 aa, ARTIFICIAL SEQUENCE
  Synthetic Construct
TKQRHK

SEQ ID NO: 20241 - protein, 6 aa, ARTIFICIAL SEQUENCE
  Synthetic Construct
TKQRIK

SEQ ID NO: 20242 - protein, 6 aa, ARTIFICIAL SEQUENCE
  Synthetic Construct
TKQRLK

SEQ ID NO: 20243 - protein, 6 aa, ARTIFICIAL SEQUENCE
  Synthetic Construct
TKQRNK

SEQ ID NO: 20244 - protein, 6 aa, ARTIFICIAL SEQUENCE
  Synthetic Construct
TKQRQK

SEQ ID NO: 20245 - protein, 6 aa, ARTIFICIAL SEQUENCE
  Synthetic Construct
TKQRRK

SEQ ID NO: 20246 - protein, 6 aa, ARTIFICIAL SEQUENCE
  Synthetic Construct
TKQRSK

SEQ ID NO: 20247 - protein, 6 aa, ARTIFICIAL SEQUENCE
  Synthetic Construct
TKQRTK

SEQ ID NO: 20248 - protein, 6 aa, ARTIFICIAL SEQUENCE
  Synthetic Construct
TKQRYK

SEQ ID NO: 20249 - protein, 6 aa, ARTIFICIAL SEQUENCE
  Synthetic Construct
TKQSAK

SEQ ID NO: 20250 - protein, 6 aa, ARTIFICIAL SEQUENCE
  Synthetic Construct
TKQSDK

SEQ ID NO: 20251 - protein, 6 aa, ARTIFICIAL SEQUENCE
  Synthetic Construct
TKQSEK

SEQ ID NO: 20252 - protein, 6 aa, ARTIFICIAL SEQUENCE
  Synthetic Construct
TKQSFK

SEQ ID NO: 20253 - protein, 6 aa, ARTIFICIAL SEQUENCE
  Synthetic Construct
TKQSGK

SEQ ID NO: 20254 - protein, 6 aa, ARTIFICIAL SEQUENCE
  Synthetic Construct
TKQSHK

SEQ ID NO: 20255 - protein, 6 aa, ARTIFICIAL SEQUENCE
  Synthetic Construct
TKQSIK

SEQ ID NO: 20256 - protein, 6 aa, ARTIFICIAL SEQUENCE
  Synthetic Construct
TKQSLK

SEQ ID NO: 20257 - protein, 6 aa, ARTIFICIAL SEQUENCE
  Synthetic Construct
TKQSNK

SEQ ID NO: 20258 - protein, 6 aa, ARTIFICIAL SEQUENCE
  Synthetic Construct
TKQSQK

SEQ ID NO: 20259 - protein, 6 aa, ARTIFICIAL SEQUENCE
  Synthetic Construct
TKQSRK

SEQ ID NO: 20260 - protein, 6 aa, ARTIFICIAL SEQUENCE
  Synthetic Construct
TKQSSK

SEQ ID NO: 20261 - protein, 6 aa, ARTIFICIAL SEQUENCE
  Synthetic Construct
TKQSTK

SEQ ID NO: 20262 - protein, 6 aa, ARTIFICIAL SEQUENCE
  Synthetic Construct
TKQSYK

SEQ ID NO: 20263 - protein, 6 aa, ARTIFICIAL SEQUENCE
  Synthetic Construct
TKQTAK

SEQ ID NO: 20264 - protein, 6 aa, ARTIFICIAL SEQUENCE
  Synthetic Construct
TKQTDK

SEQ ID NO: 20265 - protein, 6 aa, ARTIFICIAL SEQUENCE
  Synthetic Construct
TKQTEK

SEQ ID NO: 20266 - protein, 6 aa, ARTIFICIAL SEQUENCE
  Synthetic Construct
TKQTFK

SEQ ID NO: 20267 - protein, 6 aa, ARTIFICIAL SEQUENCE
  Synthetic Construct
TKQTGK

SEQ ID NO: 20268 - protein, 6 aa, ARTIFICIAL SEQUENCE
  Synthetic Construct
TKQTHK

SEQ ID NO: 20269 - protein, 6 aa, ARTIFICIAL SEQUENCE
  Synthetic Construct
TKQTIK

SEQ ID NO: 20270 - protein, 6 aa, ARTIFICIAL SEQUENCE
  Synthetic Construct
TKQTLK

SEQ ID NO: 20271 - protein, 6 aa, ARTIFICIAL SEQUENCE
  Synthetic Construct
TKQTNK

SEQ ID NO: 20272 - protein, 6 aa, ARTIFICIAL SEQUENCE
  Synthetic Construct
TKQTQK

SEQ ID NO: 20273 - protein, 6 aa, ARTIFICIAL SEQUENCE
  Synthetic Construct
TKQTRK

SEQ ID NO: 20274 - protein, 6 aa, ARTIFICIAL SEQUENCE
  Synthetic Construct
TKQTSK

SEQ ID NO: 20275 - protein, 6 aa, ARTIFICIAL SEQUENCE
  Synthetic Construct
TKQTTK

SEQ ID NO: 20276 - protein, 6 aa, ARTIFICIAL SEQUENCE
  Synthetic Construct
TKQTYK

SEQ ID NO: 20277 - protein, 6 aa, ARTIFICIAL SEQUENCE
  Synthetic Construct
TKQYAK

SEQ ID NO: 20278 - protein, 6 aa, ARTIFICIAL SEQUENCE
  Synthetic Construct
TKQYDK

SEQ ID NO: 20279 - protein, 6 aa, ARTIFICIAL SEQUENCE
  Synthetic Construct
TKQYEK

SEQ ID NO: 20280 - protein, 6 aa, ARTIFICIAL SEQUENCE
  Synthetic Construct
TKQYFK

SEQ ID NO: 20281 - protein, 6 aa, ARTIFICIAL SEQUENCE
  Synthetic Construct
TKQYGK

SEQ ID NO: 20282 - protein, 6 aa, ARTIFICIAL SEQUENCE
  Synthetic Construct
TKQYHK

SEQ ID NO: 20283 - protein, 6 aa, ARTIFICIAL SEQUENCE
  Synthetic Construct
TKQYIK

SEQ ID NO: 20284 - protein, 6 aa, ARTIFICIAL SEQUENCE
  Synthetic Construct
TKQYLK

SEQ ID NO: 20285 - protein, 6 aa, ARTIFICIAL SEQUENCE
  Synthetic Construct
TKQYNK

SEQ ID NO: 20286 - protein, 6 aa, ARTIFICIAL SEQUENCE
  Synthetic Construct
TKQYQK

SEQ ID NO: 20287 - protein, 6 aa, ARTIFICIAL SEQUENCE
  Synthetic Construct
TKQYRK

SEQ ID NO: 20288 - protein, 6 aa, ARTIFICIAL SEQUENCE
  Synthetic Construct
TKQYSK

SEQ ID NO: 20289 - protein, 6 aa, ARTIFICIAL SEQUENCE
  Synthetic Construct
TKQYTK

SEQ ID NO: 20290 - protein, 6 aa, ARTIFICIAL SEQUENCE
  Synthetic Construct
TKQYYK

SEQ ID NO: 20291 - protein, 6 aa, ARTIFICIAL SEQUENCE
  Synthetic Construct
TKRAAK

SEQ ID NO: 20292 - protein, 6 aa, ARTIFICIAL SEQUENCE
  Synthetic Construct
TKRADK

SEQ ID NO: 20293 - protein, 6 aa, ARTIFICIAL SEQUENCE
  Synthetic Construct
TKRAEK

SEQ ID NO: 20294 - protein, 6 aa, ARTIFICIAL SEQUENCE
  Synthetic Construct
TKRAFK

SEQ ID NO: 20295 - protein, 6 aa, ARTIFICIAL SEQUENCE
  Synthetic Construct
TKRAGK

SEQ ID NO: 20296 - protein, 6 aa, ARTIFICIAL SEQUENCE
  Synthetic Construct
TKRAHK

SEQ ID NO: 20297 - protein, 6 aa, ARTIFICIAL SEQUENCE
  Synthetic Construct
TKRAIK

SEQ ID NO: 20298 - protein, 6 aa, ARTIFICIAL SEQUENCE
  Synthetic Construct
TKRALK

SEQ ID NO: 20299 - protein, 6 aa, ARTIFICIAL SEQUENCE
  Synthetic Construct
TKRANK

SEQ ID NO: 20300 - protein, 6 aa, ARTIFICIAL SEQUENCE
  Synthetic Construct
TKRAQK

SEQ ID NO: 20301 - protein, 6 aa, ARTIFICIAL SEQUENCE
  Synthetic Construct
TKRARK

SEQ ID NO: 20302 - protein, 6 aa, ARTIFICIAL SEQUENCE
  Synthetic Construct
TKRASK

SEQ ID NO: 20303 - protein, 6 aa, ARTIFICIAL SEQUENCE
  Synthetic Construct
TKRATK

SEQ ID NO: 20304 - protein, 6 aa, ARTIFICIAL SEQUENCE
  Synthetic Construct
TKRAYK

SEQ ID NO: 20305 - protein, 6 aa, ARTIFICIAL SEQUENCE
  Synthetic Construct
TKRDAK

SEQ ID NO: 20306 - protein, 6 aa, ARTIFICIAL SEQUENCE
  Synthetic Construct
TKRDDK

SEQ ID NO: 20307 - protein, 6 aa, ARTIFICIAL SEQUENCE
  Synthetic Construct
TKRDEK

SEQ ID NO: 20308 - protein, 6 aa, ARTIFICIAL SEQUENCE
  Synthetic Construct
TKRDFK

SEQ ID NO: 20309 - protein, 6 aa, ARTIFICIAL SEQUENCE
  Synthetic Construct
TKRDGK

SEQ ID NO: 20310 - protein, 6 aa, ARTIFICIAL SEQUENCE
  Synthetic Construct
TKRDHK

SEQ ID NO: 20311 - protein, 6 aa, ARTIFICIAL SEQUENCE
  Synthetic Construct
TKRDIK

SEQ ID NO: 20312 - protein, 6 aa, ARTIFICIAL SEQUENCE
  Synthetic Construct
TKRDLK

SEQ ID NO: 20313 - protein, 6 aa, ARTIFICIAL SEQUENCE
  Synthetic Construct
TKRDNK

SEQ ID NO: 20314 - protein, 6 aa, ARTIFICIAL SEQUENCE
  Synthetic Construct
TKRDQK

SEQ ID NO: 20315 - protein, 6 aa, ARTIFICIAL SEQUENCE
  Synthetic Construct
TKRDRK

SEQ ID NO: 20316 - protein, 6 aa, ARTIFICIAL SEQUENCE
  Synthetic Construct
TKRDSK

SEQ ID NO: 20317 - protein, 6 aa, ARTIFICIAL SEQUENCE
  Synthetic Construct
TKRDTK

SEQ ID NO: 20318 - protein, 6 aa, ARTIFICIAL SEQUENCE
  Synthetic Construct
TKRDYK

SEQ ID NO: 20319 - protein, 6 aa, ARTIFICIAL SEQUENCE
  Synthetic Construct
TKREAK

SEQ ID NO: 20320 - protein, 6 aa, ARTIFICIAL SEQUENCE
  Synthetic Construct
TKREDK

SEQ ID NO: 20321 - protein, 6 aa, ARTIFICIAL SEQUENCE
  Synthetic Construct
TKREEK

SEQ ID NO: 20322 - protein, 6 aa, ARTIFICIAL SEQUENCE
  Synthetic Construct
TKREFK

SEQ ID NO: 20323 - protein, 6 aa, ARTIFICIAL SEQUENCE
  Synthetic Construct
TKREGK

SEQ ID NO: 20324 - protein, 6 aa, ARTIFICIAL SEQUENCE
  Synthetic Construct
TKREHK

SEQ ID NO: 20325 - protein, 6 aa, ARTIFICIAL SEQUENCE
  Synthetic Construct
TKREIK

SEQ ID NO: 20326 - protein, 6 aa, ARTIFICIAL SEQUENCE
  Synthetic Construct
TKRELK

SEQ ID NO: 20327 - protein, 6 aa, ARTIFICIAL SEQUENCE
  Synthetic Construct
TKRENK

SEQ ID NO: 20328 - protein, 6 aa, ARTIFICIAL SEQUENCE
  Synthetic Construct
TKREQK

SEQ ID NO: 20329 - protein, 6 aa, ARTIFICIAL SEQUENCE
  Synthetic Construct
TKRERK

SEQ ID NO: 20330 - protein, 6 aa, ARTIFICIAL SEQUENCE
  Synthetic Construct
TKRESK

SEQ ID NO: 20331 - protein, 6 aa, ARTIFICIAL SEQUENCE
  Synthetic Construct
TKRETK

SEQ ID NO: 20332 - protein, 6 aa, ARTIFICIAL SEQUENCE
  Synthetic Construct
TKREYK

SEQ ID NO: 20333 - protein, 6 aa, ARTIFICIAL SEQUENCE
  Synthetic Construct
TKRFAK

SEQ ID NO: 20334 - protein, 6 aa, ARTIFICIAL SEQUENCE
  Synthetic Construct
TKRFDK

SEQ ID NO: 20335 - protein, 6 aa, ARTIFICIAL SEQUENCE
  Synthetic Construct
TKRFEK

SEQ ID NO: 20336 - protein, 6 aa, ARTIFICIAL SEQUENCE
  Synthetic Construct
TKRFFK

SEQ ID NO: 20337 - protein, 6 aa, ARTIFICIAL SEQUENCE
  Synthetic Construct
TKRFGK

SEQ ID NO: 20338 - protein, 6 aa, ARTIFICIAL SEQUENCE
  Synthetic Construct
TKRFHK

SEQ ID NO: 20339 - protein, 6 aa, ARTIFICIAL SEQUENCE
  Synthetic Construct
TKRFIK

SEQ ID NO: 20340 - protein, 6 aa, ARTIFICIAL SEQUENCE
  Synthetic Construct
TKRFLK

SEQ ID NO: 20341 - protein, 6 aa, ARTIFICIAL SEQUENCE
  Synthetic Construct
TKRFNK

SEQ ID NO: 20342 - protein, 6 aa, ARTIFICIAL SEQUENCE
  Synthetic Construct
TKRFQK

SEQ ID NO: 20343 - protein, 6 aa, ARTIFICIAL SEQUENCE
  Synthetic Construct
TKRFRK

SEQ ID NO: 20344 - protein, 6 aa, ARTIFICIAL SEQUENCE
  Synthetic Construct
TKRFSK

SEQ ID NO: 20345 - protein, 6 aa, ARTIFICIAL SEQUENCE
  Synthetic Construct
TKRFTK

SEQ ID NO: 20346 - protein, 6 aa, ARTIFICIAL SEQUENCE
  Synthetic Construct
TKRFYK

SEQ ID NO: 20347 - protein, 6 aa, ARTIFICIAL SEQUENCE
  Synthetic Construct
TKRGAK

SEQ ID NO: 20348 - protein, 6 aa, ARTIFICIAL SEQUENCE
  Synthetic Construct
TKRGDK

SEQ ID NO: 20349 - protein, 6 aa, ARTIFICIAL SEQUENCE
  Synthetic Construct
TKRGEK

SEQ ID NO: 20350 - protein, 6 aa, ARTIFICIAL SEQUENCE
  Synthetic Construct
TKRGFK

SEQ ID NO: 20351 - protein, 6 aa, ARTIFICIAL SEQUENCE
  Synthetic Construct
TKRGGK

SEQ ID NO: 20352 - protein, 6 aa, ARTIFICIAL SEQUENCE
  Synthetic Construct
TKRGHK

SEQ ID NO: 20353 - protein, 6 aa, ARTIFICIAL SEQUENCE
  Synthetic Construct
TKRGIK

SEQ ID NO: 20354 - protein, 6 aa, ARTIFICIAL SEQUENCE
  Synthetic Construct
TKRGLK

SEQ ID NO: 20355 - protein, 6 aa, ARTIFICIAL SEQUENCE
  Synthetic Construct
TKRGNK

SEQ ID NO: 20356 - protein, 6 aa, ARTIFICIAL SEQUENCE
  Synthetic Construct
TKRGQK

SEQ ID NO: 20357 - protein, 6 aa, ARTIFICIAL SEQUENCE
  Synthetic Construct
TKRGRK

SEQ ID NO: 20358 - protein, 6 aa, ARTIFICIAL SEQUENCE
  Synthetic Construct
TKRGSK

SEQ ID NO: 20359 - protein, 6 aa, ARTIFICIAL SEQUENCE
  Synthetic Construct
TKRGTK

SEQ ID NO: 20360 - protein, 6 aa, ARTIFICIAL SEQUENCE
  Synthetic Construct
TKRGYK

SEQ ID NO: 20361 - protein, 6 aa, ARTIFICIAL SEQUENCE
  Synthetic Construct
TKRHAK

SEQ ID NO: 20362 - protein, 6 aa, ARTIFICIAL SEQUENCE
  Synthetic Construct
TKRHDK

SEQ ID NO: 20363 - protein, 6 aa, ARTIFICIAL SEQUENCE
  Synthetic Construct
TKRHEK

SEQ ID NO: 20364 - protein, 6 aa, ARTIFICIAL SEQUENCE
  Synthetic Construct
TKRHFK

SEQ ID NO: 20365 - protein, 6 aa, ARTIFICIAL SEQUENCE
  Synthetic Construct
TKRHGK

SEQ ID NO: 20366 - protein, 6 aa, ARTIFICIAL SEQUENCE
  Synthetic Construct
TKRHHK

SEQ ID NO: 20367 - protein, 6 aa, ARTIFICIAL SEQUENCE
  Synthetic Construct
TKRHIK

SEQ ID NO: 20368 - protein, 6 aa, ARTIFICIAL SEQUENCE
  Synthetic Construct
TKRHLK

SEQ ID NO: 20369 - protein, 6 aa, ARTIFICIAL SEQUENCE
  Synthetic Construct
TKRHNK

SEQ ID NO: 20370 - protein, 6 aa, ARTIFICIAL SEQUENCE
  Synthetic Construct
TKRHQK

SEQ ID NO: 20371 - protein, 6 aa, ARTIFICIAL SEQUENCE
  Synthetic Construct
TKRHRK

SEQ ID NO: 20372 - protein, 6 aa, ARTIFICIAL SEQUENCE
  Synthetic Construct
TKRHSK

SEQ ID NO: 20373 - protein, 6 aa, ARTIFICIAL SEQUENCE
  Synthetic Construct
TKRHTK

SEQ ID NO: 20374 - protein, 6 aa, ARTIFICIAL SEQUENCE
  Synthetic Construct
TKRHYK

SEQ ID NO: 20375 - protein, 6 aa, ARTIFICIAL SEQUENCE
  Synthetic Construct
TKRIAK

SEQ ID NO: 20376 - protein, 6 aa, ARTIFICIAL SEQUENCE
  Synthetic Construct
TKRIDK

SEQ ID NO: 20377 - protein, 6 aa, ARTIFICIAL SEQUENCE
  Synthetic Construct
TKRIEK

SEQ ID NO: 20378 - protein, 6 aa, ARTIFICIAL SEQUENCE
  Synthetic Construct
TKRIFK

SEQ ID NO: 20379 - protein, 6 aa, ARTIFICIAL SEQUENCE
  Synthetic Construct
TKRIGK

SEQ ID NO: 20380 - protein, 6 aa, ARTIFICIAL SEQUENCE
  Synthetic Construct
TKRIHK

SEQ ID NO: 20381 - protein, 6 aa, ARTIFICIAL SEQUENCE
  Synthetic Construct
TKRIIK

SEQ ID NO: 20382 - protein, 6 aa, ARTIFICIAL SEQUENCE
  Synthetic Construct
TKRILK

SEQ ID NO: 20383 - protein, 6 aa, ARTIFICIAL SEQUENCE
  Synthetic Construct
TKRINK

SEQ ID NO: 20384 - protein, 6 aa, ARTIFICIAL SEQUENCE
  Synthetic Construct
TKRIQK

SEQ ID NO: 20385 - protein, 6 aa, ARTIFICIAL SEQUENCE
  Synthetic Construct
TKRIRK

SEQ ID NO: 20386 - protein, 6 aa, ARTIFICIAL SEQUENCE
  Synthetic Construct
TKRISK

SEQ ID NO: 20387 - protein, 6 aa, ARTIFICIAL SEQUENCE
  Synthetic Construct
TKRITK

SEQ ID NO: 20388 - protein, 6 aa, ARTIFICIAL SEQUENCE
  Synthetic Construct
TKRIYK

SEQ ID NO: 20389 - protein, 6 aa, ARTIFICIAL SEQUENCE
  Synthetic Construct
TKRLAK

SEQ ID NO: 20390 - protein, 6 aa, ARTIFICIAL SEQUENCE
  Synthetic Construct
TKRLDK

SEQ ID NO: 20391 - protein, 6 aa, ARTIFICIAL SEQUENCE
  Synthetic Construct
TKRLEK

SEQ ID NO: 20392 - protein, 6 aa, ARTIFICIAL SEQUENCE
  Synthetic Construct
TKRLFK

SEQ ID NO: 20393 - protein, 6 aa, ARTIFICIAL SEQUENCE
  Synthetic Construct
TKRLGK

SEQ ID NO: 20394 - protein, 6 aa, ARTIFICIAL SEQUENCE
  Synthetic Construct
TKRLHK

SEQ ID NO: 20395 - protein, 6 aa, ARTIFICIAL SEQUENCE
  Synthetic Construct
TKRLIK

SEQ ID NO: 20396 - protein, 6 aa, ARTIFICIAL SEQUENCE
  Synthetic Construct
TKRLLK

SEQ ID NO: 20397 - protein, 6 aa, ARTIFICIAL SEQUENCE
  Synthetic Construct
TKRLNK

SEQ ID NO: 20398 - protein, 6 aa, ARTIFICIAL SEQUENCE
  Synthetic Construct
TKRLQK

SEQ ID NO: 20399 - protein, 6 aa, ARTIFICIAL SEQUENCE
  Synthetic Construct
TKRLRK

SEQ ID NO: 20400 - protein, 6 aa, ARTIFICIAL SEQUENCE
  Synthetic Construct
TKRLSK

SEQ ID NO: 20401 - protein, 6 aa, ARTIFICIAL SEQUENCE
  Synthetic Construct
TKRLTK

SEQ ID NO: 20402 - protein, 6 aa, ARTIFICIAL SEQUENCE
  Synthetic Construct
TKRLYK

SEQ ID NO: 20403 - protein, 6 aa, ARTIFICIAL SEQUENCE
  Synthetic Construct
TKRNAK

SEQ ID NO: 20404 - protein, 6 aa, ARTIFICIAL SEQUENCE
  Synthetic Construct
TKRNDK

SEQ ID NO: 20405 - protein, 6 aa, ARTIFICIAL SEQUENCE
  Synthetic Construct
TKRNEK

SEQ ID NO: 20406 - protein, 6 aa, ARTIFICIAL SEQUENCE
  Synthetic Construct
TKRNFK

SEQ ID NO: 20407 - protein, 6 aa, ARTIFICIAL SEQUENCE
  Synthetic Construct
TKRNGK

SEQ ID NO: 20408 - protein, 6 aa, ARTIFICIAL SEQUENCE
  Synthetic Construct
TKRNHK

SEQ ID NO: 20409 - protein, 6 aa, ARTIFICIAL SEQUENCE
  Synthetic Construct
TKRNIK

SEQ ID NO: 20410 - protein, 6 aa, ARTIFICIAL SEQUENCE
  Synthetic Construct
TKRNLK

SEQ ID NO: 20411 - protein, 6 aa, ARTIFICIAL SEQUENCE
  Synthetic Construct
TKRNNK

SEQ ID NO: 20412 - protein, 6 aa, ARTIFICIAL SEQUENCE
  Synthetic Construct
TKRNQK

SEQ ID NO: 20413 - protein, 6 aa, ARTIFICIAL SEQUENCE
  Synthetic Construct
TKRNRK

SEQ ID NO: 20414 - protein, 6 aa, ARTIFICIAL SEQUENCE
  Synthetic Construct
TKRNSK

SEQ ID NO: 20415 - protein, 6 aa, ARTIFICIAL SEQUENCE
  Synthetic Construct
TKRNTK

SEQ ID NO: 20416 - protein, 6 aa, ARTIFICIAL SEQUENCE
  Synthetic Construct
TKRNYK

SEQ ID NO: 20417 - protein, 6 aa, ARTIFICIAL SEQUENCE
  Synthetic Construct
TKRQAK

SEQ ID NO: 20418 - protein, 6 aa, ARTIFICIAL SEQUENCE
  Synthetic Construct
TKRQDK

SEQ ID NO: 20419 - protein, 6 aa, ARTIFICIAL SEQUENCE
  Synthetic Construct
TKRQEK

SEQ ID NO: 20420 - protein, 6 aa, ARTIFICIAL SEQUENCE
  Synthetic Construct
TKRQFK

SEQ ID NO: 20421 - protein, 6 aa, ARTIFICIAL SEQUENCE
  Synthetic Construct
TKRQGK

SEQ ID NO: 20422 - protein, 6 aa, ARTIFICIAL SEQUENCE
  Synthetic Construct
TKRQHK

SEQ ID NO: 20423 - protein, 6 aa, ARTIFICIAL SEQUENCE
  Synthetic Construct
TKRQIK

SEQ ID NO: 20424 - protein, 6 aa, ARTIFICIAL SEQUENCE
  Synthetic Construct
TKRQLK

SEQ ID NO: 20425 - protein, 6 aa, ARTIFICIAL SEQUENCE
  Synthetic Construct
TKRQNK

SEQ ID NO: 20426 - protein, 6 aa, ARTIFICIAL SEQUENCE
  Synthetic Construct
TKRQQK

SEQ ID NO: 20427 - protein, 6 aa, ARTIFICIAL SEQUENCE
  Synthetic Construct
TKRQRK

SEQ ID NO: 20428 - protein, 6 aa, ARTIFICIAL SEQUENCE
  Synthetic Construct
TKRQSK

SEQ ID NO: 20429 - protein, 6 aa, ARTIFICIAL SEQUENCE
  Synthetic Construct
TKRQTK

SEQ ID NO: 20430 - protein, 6 aa, ARTIFICIAL SEQUENCE
  Synthetic Construct
TKRQYK

SEQ ID NO: 20431 - protein, 6 aa, ARTIFICIAL SEQUENCE
  Synthetic Construct
TKRRAK

SEQ ID NO: 20432 - protein, 6 aa, ARTIFICIAL SEQUENCE
  Synthetic Construct
TKRRDK

SEQ ID NO: 20433 - protein, 6 aa, ARTIFICIAL SEQUENCE
  Synthetic Construct
TKRREK

SEQ ID NO: 20434 - protein, 6 aa, ARTIFICIAL SEQUENCE
  Synthetic Construct
TKRRFK

SEQ ID NO: 20435 - protein, 6 aa, ARTIFICIAL SEQUENCE
  Synthetic Construct
TKRRGK

SEQ ID NO: 20436 - protein, 6 aa, ARTIFICIAL SEQUENCE
  Synthetic Construct
TKRRHK

SEQ ID NO: 20437 - protein, 6 aa, ARTIFICIAL SEQUENCE
  Synthetic Construct
TKRRIK

SEQ ID NO: 20438 - protein, 6 aa, ARTIFICIAL SEQUENCE
  Synthetic Construct
TKRRLK

SEQ ID NO: 20439 - protein, 6 aa, ARTIFICIAL SEQUENCE
  Synthetic Construct
TKRRNK

SEQ ID NO: 20440 - protein, 6 aa, ARTIFICIAL SEQUENCE
  Synthetic Construct
TKRRQK

SEQ ID NO: 20441 - protein, 6 aa, ARTIFICIAL SEQUENCE
  Synthetic Construct
TKRRRK

SEQ ID NO: 20442 - protein, 6 aa, ARTIFICIAL SEQUENCE
  Synthetic Construct
TKRRSK

SEQ ID NO: 20443 - protein, 6 aa, ARTIFICIAL SEQUENCE
  Synthetic Construct
TKRRTK

SEQ ID NO: 20444 - protein, 6 aa, ARTIFICIAL SEQUENCE
  Synthetic Construct
TKRRYK

SEQ ID NO: 20445 - protein, 6 aa, ARTIFICIAL SEQUENCE
  Synthetic Construct
TKRSAK

SEQ ID NO: 20446 - protein, 6 aa, ARTIFICIAL SEQUENCE
  Synthetic Construct
TKRSDK

SEQ ID NO: 20447 - protein, 6 aa, ARTIFICIAL SEQUENCE
  Synthetic Construct
TKRSEK

SEQ ID NO: 20448 - protein, 6 aa, ARTIFICIAL SEQUENCE
  Synthetic Construct
TKRSFK

SEQ ID NO: 20449 - protein, 6 aa, ARTIFICIAL SEQUENCE
  Synthetic Construct
TKRSGK

SEQ ID NO: 20450 - protein, 6 aa, ARTIFICIAL SEQUENCE
  Synthetic Construct
TKRSHK

SEQ ID NO: 20451 - protein, 6 aa, ARTIFICIAL SEQUENCE
  Synthetic Construct
TKRSIK

SEQ ID NO: 20452 - protein, 6 aa, ARTIFICIAL SEQUENCE
  Synthetic Construct
TKRSLK

SEQ ID NO: 20453 - protein, 6 aa, ARTIFICIAL SEQUENCE
  Synthetic Construct
TKRSNK

SEQ ID NO: 20454 - protein, 6 aa, ARTIFICIAL SEQUENCE
  Synthetic Construct
TKRSQK

SEQ ID NO: 20455 - protein, 6 aa, ARTIFICIAL SEQUENCE
  Synthetic Construct
TKRSRK

SEQ ID NO: 20456 - protein, 6 aa, ARTIFICIAL SEQUENCE
  Synthetic Construct
TKRSSK

SEQ ID NO: 20457 - protein, 6 aa, ARTIFICIAL SEQUENCE
  Synthetic Construct
TKRSTK

SEQ ID NO: 20458 - protein, 6 aa, ARTIFICIAL SEQUENCE
  Synthetic Construct
TKRSYK

SEQ ID NO: 20459 - protein, 6 aa, ARTIFICIAL SEQUENCE
  Synthetic Construct
TKRTAK

SEQ ID NO: 20460 - protein, 6 aa, ARTIFICIAL SEQUENCE
  Synthetic Construct
TKRTDK

SEQ ID NO: 20461 - protein, 6 aa, ARTIFICIAL SEQUENCE
  Synthetic Construct
TKRTEK

SEQ ID NO: 20462 - protein, 6 aa, ARTIFICIAL SEQUENCE
  Synthetic Construct
TKRTFK

SEQ ID NO: 20463 - protein, 6 aa, ARTIFICIAL SEQUENCE
  Synthetic Construct
TKRTGK

SEQ ID NO: 20464 - protein, 6 aa, ARTIFICIAL SEQUENCE
  Synthetic Construct
TKRTHK

SEQ ID NO: 20465 - protein, 6 aa, ARTIFICIAL SEQUENCE
  Synthetic Construct
TKRTIK

SEQ ID NO: 20466 - protein, 6 aa, ARTIFICIAL SEQUENCE
  Synthetic Construct
TKRTLK

SEQ ID NO: 20467 - protein, 6 aa, ARTIFICIAL SEQUENCE
  Synthetic Construct
TKRTNK

SEQ ID NO: 20468 - protein, 6 aa, ARTIFICIAL SEQUENCE
  Synthetic Construct
TKRTQK

SEQ ID NO: 20469 - protein, 6 aa, ARTIFICIAL SEQUENCE
  Synthetic Construct
TKRTRK

SEQ ID NO: 20470 - protein, 6 aa, ARTIFICIAL SEQUENCE
  Synthetic Construct
TKRTSK

SEQ ID NO: 20471 - protein, 6 aa, ARTIFICIAL SEQUENCE
  Synthetic Construct
TKRTTK

SEQ ID NO: 20472 - protein, 6 aa, ARTIFICIAL SEQUENCE
  Synthetic Construct
TKRTYK

SEQ ID NO: 20473 - protein, 6 aa, ARTIFICIAL SEQUENCE
  Synthetic Construct
TKRYAK

SEQ ID NO: 20474 - protein, 6 aa, ARTIFICIAL SEQUENCE
  Synthetic Construct
TKRYDK

SEQ ID NO: 20475 - protein, 6 aa, ARTIFICIAL SEQUENCE
  Synthetic Construct
TKRYEK

SEQ ID NO: 20476 - protein, 6 aa, ARTIFICIAL SEQUENCE
  Synthetic Construct
TKRYFK

SEQ ID NO: 20477 - protein, 6 aa, ARTIFICIAL SEQUENCE
  Synthetic Construct
TKRYGK

SEQ ID NO: 20478 - protein, 6 aa, ARTIFICIAL SEQUENCE
  Synthetic Construct
TKRYHK

SEQ ID NO: 20479 - protein, 6 aa, ARTIFICIAL SEQUENCE
  Synthetic Construct
TKRYIK

SEQ ID NO: 20480 - protein, 6 aa, ARTIFICIAL SEQUENCE
  Synthetic Construct
TKRYLK

SEQ ID NO: 20481 - protein, 6 aa, ARTIFICIAL SEQUENCE
  Synthetic Construct
TKRYNK

SEQ ID NO: 20482 - protein, 6 aa, ARTIFICIAL SEQUENCE
  Synthetic Construct
TKRYQK

SEQ ID NO: 20483 - protein, 6 aa, ARTIFICIAL SEQUENCE
  Synthetic Construct
TKRYRK

SEQ ID NO: 20484 - protein, 6 aa, ARTIFICIAL SEQUENCE
  Synthetic Construct
TKRYSK

SEQ ID NO: 20485 - protein, 6 aa, ARTIFICIAL SEQUENCE
  Synthetic Construct
TKRYTK

SEQ ID NO: 20486 - protein, 6 aa, ARTIFICIAL SEQUENCE
  Synthetic Construct
TKRYYK

SEQ ID NO: 20487 - protein, 6 aa, ARTIFICIAL SEQUENCE
  Synthetic Construct
TKSAAK

SEQ ID NO: 20488 - protein, 6 aa, ARTIFICIAL SEQUENCE
  Synthetic Construct
TKSADK

SEQ ID NO: 20489 - protein, 6 aa, ARTIFICIAL SEQUENCE
  Synthetic Construct
TKSAEK

SEQ ID NO: 20490 - protein, 6 aa, ARTIFICIAL SEQUENCE
  Synthetic Construct
TKSAFK

SEQ ID NO: 20491 - protein, 6 aa, ARTIFICIAL SEQUENCE
  Synthetic Construct
TKSAGK

SEQ ID NO: 20492 - protein, 6 aa, ARTIFICIAL SEQUENCE
  Synthetic Construct
TKSAHK

SEQ ID NO: 20493 - protein, 6 aa, ARTIFICIAL SEQUENCE
  Synthetic Construct
TKSAIK

SEQ ID NO: 20494 - protein, 6 aa, ARTIFICIAL SEQUENCE
  Synthetic Construct
TKSALK

SEQ ID NO: 20495 - protein, 6 aa, ARTIFICIAL SEQUENCE
  Synthetic Construct
TKSANK

SEQ ID NO: 20496 - protein, 6 aa, ARTIFICIAL SEQUENCE
  Synthetic Construct
TKSAQK

SEQ ID NO: 20497 - protein, 6 aa, ARTIFICIAL SEQUENCE
  Synthetic Construct
TKSARK

SEQ ID NO: 20498 - protein, 6 aa, ARTIFICIAL SEQUENCE
  Synthetic Construct
TKSASK

SEQ ID NO: 20499 - protein, 6 aa, ARTIFICIAL SEQUENCE
  Synthetic Construct
TKSATK

SEQ ID NO: 20500 - protein, 6 aa, ARTIFICIAL SEQUENCE
  Synthetic Construct
TKSAYK

SEQ ID NO: 20501 - protein, 6 aa, ARTIFICIAL SEQUENCE
  Synthetic Construct
TKSDAK

SEQ ID NO: 20502 - protein, 6 aa, ARTIFICIAL SEQUENCE
  Synthetic Construct
TKSDDK

SEQ ID NO: 20503 - protein, 6 aa, ARTIFICIAL SEQUENCE
  Synthetic Construct
TKSDEK

SEQ ID NO: 20504 - protein, 6 aa, ARTIFICIAL SEQUENCE
  Synthetic Construct
TKSDFK

SEQ ID NO: 20505 - protein, 6 aa, ARTIFICIAL SEQUENCE
  Synthetic Construct
TKSDGK

SEQ ID NO: 20506 - protein, 6 aa, ARTIFICIAL SEQUENCE
  Synthetic Construct
TKSDHK

SEQ ID NO: 20507 - protein, 6 aa, ARTIFICIAL SEQUENCE
  Synthetic Construct
TKSDIK

SEQ ID NO: 20508 - protein, 6 aa, ARTIFICIAL SEQUENCE
  Synthetic Construct
TKSDLK

SEQ ID NO: 20509 - protein, 6 aa, ARTIFICIAL SEQUENCE
  Synthetic Construct
TKSDNK

SEQ ID NO: 20510 - protein, 6 aa, ARTIFICIAL SEQUENCE
  Synthetic Construct
TKSDQK

SEQ ID NO: 20511 - protein, 6 aa, ARTIFICIAL SEQUENCE
  Synthetic Construct
TKSDRK

SEQ ID NO: 20512 - protein, 6 aa, ARTIFICIAL SEQUENCE
  Synthetic Construct
TKSDSK

SEQ ID NO: 20513 - protein, 6 aa, ARTIFICIAL SEQUENCE
  Synthetic Construct
TKSDTK

SEQ ID NO: 20514 - protein, 6 aa, ARTIFICIAL SEQUENCE
  Synthetic Construct
TKSDYK

SEQ ID NO: 20515 - protein, 6 aa, ARTIFICIAL SEQUENCE
  Synthetic Construct
TKSEAK

SEQ ID NO: 20516 - protein, 6 aa, ARTIFICIAL SEQUENCE
  Synthetic Construct
TKSEDK

SEQ ID NO: 20517 - protein, 6 aa, ARTIFICIAL SEQUENCE
  Synthetic Construct
TKSEEK

SEQ ID NO: 20518 - protein, 6 aa, ARTIFICIAL SEQUENCE
  Synthetic Construct
TKSEFK

SEQ ID NO: 20519 - protein, 6 aa, ARTIFICIAL SEQUENCE
  Synthetic Construct
TKSEGK

SEQ ID NO: 20520 - protein, 6 aa, ARTIFICIAL SEQUENCE
  Synthetic Construct
TKSEHK

SEQ ID NO: 20521 - protein, 6 aa, ARTIFICIAL SEQUENCE
  Synthetic Construct
TKSEIK

SEQ ID NO: 20522 - protein, 6 aa, ARTIFICIAL SEQUENCE
  Synthetic Construct
TKSELK

SEQ ID NO: 20523 - protein, 6 aa, ARTIFICIAL SEQUENCE
  Synthetic Construct
TKSENK

SEQ ID NO: 20524 - protein, 6 aa, ARTIFICIAL SEQUENCE
  Synthetic Construct
TKSEQK

SEQ ID NO: 20525 - protein, 6 aa, ARTIFICIAL SEQUENCE
  Synthetic Construct
TKSERK

SEQ ID NO: 20526 - protein, 6 aa, ARTIFICIAL SEQUENCE
  Synthetic Construct
TKSESK

SEQ ID NO: 20527 - protein, 6 aa, ARTIFICIAL SEQUENCE
  Synthetic Construct
TKSETK

SEQ ID NO: 20528 - protein, 6 aa, ARTIFICIAL SEQUENCE
  Synthetic Construct
TKSEYK

SEQ ID NO: 20529 - protein, 6 aa, ARTIFICIAL SEQUENCE
  Synthetic Construct
TKSFAK

SEQ ID NO: 20530 - protein, 6 aa, ARTIFICIAL SEQUENCE
  Synthetic Construct
TKSFDK

SEQ ID NO: 20531 - protein, 6 aa, ARTIFICIAL SEQUENCE
  Synthetic Construct
TKSFEK

SEQ ID NO: 20532 - protein, 6 aa, ARTIFICIAL SEQUENCE
  Synthetic Construct
TKSFFK

SEQ ID NO: 20533 - protein, 6 aa, ARTIFICIAL SEQUENCE
  Synthetic Construct
TKSFGK

SEQ ID NO: 20534 - protein, 6 aa, ARTIFICIAL SEQUENCE
  Synthetic Construct
TKSFHK

SEQ ID NO: 20535 - protein, 6 aa, ARTIFICIAL SEQUENCE
  Synthetic Construct
TKSFIK

SEQ ID NO: 20536 - protein, 6 aa, ARTIFICIAL SEQUENCE
  Synthetic Construct
TKSFLK

SEQ ID NO: 20537 - protein, 6 aa, ARTIFICIAL SEQUENCE
  Synthetic Construct
TKSFNK

SEQ ID NO: 20538 - protein, 6 aa, ARTIFICIAL SEQUENCE
  Synthetic Construct
TKSFQK

SEQ ID NO: 20539 - protein, 6 aa, ARTIFICIAL SEQUENCE
  Synthetic Construct
TKSFRK

SEQ ID NO: 20540 - protein, 6 aa, ARTIFICIAL SEQUENCE
  Synthetic Construct
TKSFSK

SEQ ID NO: 20541 - protein, 6 aa, ARTIFICIAL SEQUENCE
  Synthetic Construct
TKSFTK

SEQ ID NO: 20542 - protein, 6 aa, ARTIFICIAL SEQUENCE
  Synthetic Construct
TKSFYK

SEQ ID NO: 20543 - protein, 6 aa, ARTIFICIAL SEQUENCE
  Synthetic Construct
TKSGAK

SEQ ID NO: 20544 - protein, 6 aa, ARTIFICIAL SEQUENCE
  Synthetic Construct
TKSGDK

SEQ ID NO: 20545 - protein, 6 aa, ARTIFICIAL SEQUENCE
  Synthetic Construct
TKSGEK

SEQ ID NO: 20546 - protein, 6 aa, ARTIFICIAL SEQUENCE
  Synthetic Construct
TKSGFK

SEQ ID NO: 20547 - protein, 6 aa, ARTIFICIAL SEQUENCE
  Synthetic Construct
TKSGGK

SEQ ID NO: 20548 - protein, 6 aa, ARTIFICIAL SEQUENCE
  Synthetic Construct
TKSGHK

SEQ ID NO: 20549 - protein, 6 aa, ARTIFICIAL SEQUENCE
  Synthetic Construct
TKSGIK

SEQ ID NO: 20550 - protein, 6 aa, ARTIFICIAL SEQUENCE
  Synthetic Construct
TKSGLK

SEQ ID NO: 20551 - protein, 6 aa, ARTIFICIAL SEQUENCE
  Synthetic Construct
TKSGNK

SEQ ID NO: 20552 - protein, 6 aa, ARTIFICIAL SEQUENCE
  Synthetic Construct
TKSGQK

SEQ ID NO: 20553 - protein, 6 aa, ARTIFICIAL SEQUENCE
  Synthetic Construct
TKSGRK

SEQ ID NO: 20554 - protein, 6 aa, ARTIFICIAL SEQUENCE
  Synthetic Construct
TKSGSK

SEQ ID NO: 20555 - protein, 6 aa, ARTIFICIAL SEQUENCE
  Synthetic Construct
TKSGTK

SEQ ID NO: 20556 - protein, 6 aa, ARTIFICIAL SEQUENCE
  Synthetic Construct
TKSGYK

SEQ ID NO: 20557 - protein, 6 aa, ARTIFICIAL SEQUENCE
  Synthetic Construct
TKSHAK

SEQ ID NO: 20558 - protein, 6 aa, ARTIFICIAL SEQUENCE
  Synthetic Construct
TKSHDK

SEQ ID NO: 20559 - protein, 6 aa, ARTIFICIAL SEQUENCE
  Synthetic Construct
TKSHEK

SEQ ID NO: 20560 - protein, 6 aa, ARTIFICIAL SEQUENCE
  Synthetic Construct
TKSHFK

SEQ ID NO: 20561 - protein, 6 aa, ARTIFICIAL SEQUENCE
  Synthetic Construct
TKSHGK

SEQ ID NO: 20562 - protein, 6 aa, ARTIFICIAL SEQUENCE
  Synthetic Construct
TKSHHK

SEQ ID NO: 20563 - protein, 6 aa, ARTIFICIAL SEQUENCE
  Synthetic Construct
TKSHIK

SEQ ID NO: 20564 - protein, 6 aa, ARTIFICIAL SEQUENCE
  Synthetic Construct
TKSHLK

SEQ ID NO: 20565 - protein, 6 aa, ARTIFICIAL SEQUENCE
  Synthetic Construct
TKSHNK

SEQ ID NO: 20566 - protein, 6 aa, ARTIFICIAL SEQUENCE
  Synthetic Construct
TKSHQK

SEQ ID NO: 20567 - protein, 6 aa, ARTIFICIAL SEQUENCE
  Synthetic Construct
TKSHRK

SEQ ID NO: 20568 - protein, 6 aa, ARTIFICIAL SEQUENCE
  Synthetic Construct
TKSHSK

SEQ ID NO: 20569 - protein, 6 aa, ARTIFICIAL SEQUENCE
  Synthetic Construct
TKSHTK

SEQ ID NO: 20570 - protein, 6 aa, ARTIFICIAL SEQUENCE
  Synthetic Construct
TKSHYK

SEQ ID NO: 20571 - protein, 6 aa, ARTIFICIAL SEQUENCE
  Synthetic Construct
TKSIAK

SEQ ID NO: 20572 - protein, 6 aa, ARTIFICIAL SEQUENCE
  Synthetic Construct
TKSIDK

SEQ ID NO: 20573 - protein, 6 aa, ARTIFICIAL SEQUENCE
  Synthetic Construct
TKSIEK

SEQ ID NO: 20574 - protein, 6 aa, ARTIFICIAL SEQUENCE
  Synthetic Construct
TKSIFK

SEQ ID NO: 20575 - protein, 6 aa, ARTIFICIAL SEQUENCE
  Synthetic Construct
TKSIGK

SEQ ID NO: 20576 - protein, 6 aa, ARTIFICIAL SEQUENCE
  Synthetic Construct
TKSIHK

SEQ ID NO: 20577 - protein, 6 aa, ARTIFICIAL SEQUENCE
  Synthetic Construct
TKSIIK

SEQ ID NO: 20578 - protein, 6 aa, ARTIFICIAL SEQUENCE
  Synthetic Construct
TKSILK

SEQ ID NO: 20579 - protein, 6 aa, ARTIFICIAL SEQUENCE
  Synthetic Construct
TKSINK

SEQ ID NO: 20580 - protein, 6 aa, ARTIFICIAL SEQUENCE
  Synthetic Construct
TKSIQK

SEQ ID NO: 20581 - protein, 6 aa, ARTIFICIAL SEQUENCE
  Synthetic Construct
TKSIRK

SEQ ID NO: 20582 - protein, 6 aa, ARTIFICIAL SEQUENCE
  Synthetic Construct
TKSISK

SEQ ID NO: 20583 - protein, 6 aa, ARTIFICIAL SEQUENCE
  Synthetic Construct
TKSITK

SEQ ID NO: 20584 - protein, 6 aa, ARTIFICIAL SEQUENCE
  Synthetic Construct
TKSIYK

SEQ ID NO: 20585 - protein, 6 aa, ARTIFICIAL SEQUENCE
  Synthetic Construct
TKSLAK

SEQ ID NO: 20586 - protein, 6 aa, ARTIFICIAL SEQUENCE
  Synthetic Construct
TKSLDK

SEQ ID NO: 20587 - protein, 6 aa, ARTIFICIAL SEQUENCE
  Synthetic Construct
TKSLEK

SEQ ID NO: 20588 - protein, 6 aa, ARTIFICIAL SEQUENCE
  Synthetic Construct
TKSLFK

SEQ ID NO: 20589 - protein, 6 aa, ARTIFICIAL SEQUENCE
  Synthetic Construct
TKSLGK

SEQ ID NO: 20590 - protein, 6 aa, ARTIFICIAL SEQUENCE
  Synthetic Construct
TKSLHK

SEQ ID NO: 20591 - protein, 6 aa, ARTIFICIAL SEQUENCE
  Synthetic Construct
TKSLIK

SEQ ID NO: 20592 - protein, 6 aa, ARTIFICIAL SEQUENCE
  Synthetic Construct
TKSLLK

SEQ ID NO: 20593 - protein, 6 aa, ARTIFICIAL SEQUENCE
  Synthetic Construct
TKSLNK

SEQ ID NO: 20594 - protein, 6 aa, ARTIFICIAL SEQUENCE
  Synthetic Construct
TKSLQK

SEQ ID NO: 20595 - protein, 6 aa, ARTIFICIAL SEQUENCE
  Synthetic Construct
TKSLRK

SEQ ID NO: 20596 - protein, 6 aa, ARTIFICIAL SEQUENCE
  Synthetic Construct
TKSLSK

SEQ ID NO: 20597 - protein, 6 aa, ARTIFICIAL SEQUENCE
  Synthetic Construct
TKSLTK

SEQ ID NO: 20598 - protein, 6 aa, ARTIFICIAL SEQUENCE
  Synthetic Construct
TKSLYK

SEQ ID NO: 20599 - protein, 6 aa, ARTIFICIAL SEQUENCE
  Synthetic Construct
TKSNAK

SEQ ID NO: 20600 - protein, 6 aa, ARTIFICIAL SEQUENCE
  Synthetic Construct
TKSNDK

SEQ ID NO: 20601 - protein, 6 aa, ARTIFICIAL SEQUENCE
  Synthetic Construct
TKSNEK

SEQ ID NO: 20602 - protein, 6 aa, ARTIFICIAL SEQUENCE
  Synthetic Construct
TKSNFK

SEQ ID NO: 20603 - protein, 6 aa, ARTIFICIAL SEQUENCE
  Synthetic Construct
TKSNGK

SEQ ID NO: 20604 - protein, 6 aa, ARTIFICIAL SEQUENCE
  Synthetic Construct
TKSNHK

SEQ ID NO: 20605 - protein, 6 aa, ARTIFICIAL SEQUENCE
  Synthetic Construct
TKSNIK

SEQ ID NO: 20606 - protein, 6 aa, ARTIFICIAL SEQUENCE
  Synthetic Construct
TKSNLK

SEQ ID NO: 20607 - protein, 6 aa, ARTIFICIAL SEQUENCE
  Synthetic Construct
TKSNNK

SEQ ID NO: 20608 - protein, 6 aa, ARTIFICIAL SEQUENCE
  Synthetic Construct
TKSNQK

SEQ ID NO: 20609 - protein, 6 aa, ARTIFICIAL SEQUENCE
  Synthetic Construct
TKSNRK

SEQ ID NO: 20610 - protein, 6 aa, ARTIFICIAL SEQUENCE
  Synthetic Construct
TKSNSK

SEQ ID NO: 20611 - protein, 6 aa, ARTIFICIAL SEQUENCE
  Synthetic Construct
TKSNTK

SEQ ID NO: 20612 - protein, 6 aa, ARTIFICIAL SEQUENCE
  Synthetic Construct
TKSNYK

SEQ ID NO: 20613 - protein, 6 aa, ARTIFICIAL SEQUENCE
  Synthetic Construct
TKSQAK

SEQ ID NO: 20614 - protein, 6 aa, ARTIFICIAL SEQUENCE
  Synthetic Construct
TKSQDK

SEQ ID NO: 20615 - protein, 6 aa, ARTIFICIAL SEQUENCE
  Synthetic Construct
TKSQEK

SEQ ID NO: 20616 - protein, 6 aa, ARTIFICIAL SEQUENCE
  Synthetic Construct
TKSQFK

SEQ ID NO: 20617 - protein, 6 aa, ARTIFICIAL SEQUENCE
  Synthetic Construct
TKSQGK

SEQ ID NO: 20618 - protein, 6 aa, ARTIFICIAL SEQUENCE
  Synthetic Construct
TKSQHK

SEQ ID NO: 20619 - protein, 6 aa, ARTIFICIAL SEQUENCE
  Synthetic Construct
TKSQIK

SEQ ID NO: 20620 - protein, 6 aa, ARTIFICIAL SEQUENCE
  Synthetic Construct
TKSQLK

SEQ ID NO: 20621 - protein, 6 aa, ARTIFICIAL SEQUENCE
  Synthetic Construct
TKSQNK

SEQ ID NO: 20622 - protein, 6 aa, ARTIFICIAL SEQUENCE
  Synthetic Construct
TKSQQK

SEQ ID NO: 20623 - protein, 6 aa, ARTIFICIAL SEQUENCE
  Synthetic Construct
TKSQRK

SEQ ID NO: 20624 - protein, 6 aa, ARTIFICIAL SEQUENCE
  Synthetic Construct
TKSQSK

SEQ ID NO: 20625 - protein, 6 aa, ARTIFICIAL SEQUENCE
  Synthetic Construct
TKSQTK

SEQ ID NO: 20626 - protein, 6 aa, ARTIFICIAL SEQUENCE
  Synthetic Construct
TKSQYK

SEQ ID NO: 20627 - protein, 6 aa, ARTIFICIAL SEQUENCE
  Synthetic Construct
TKSRAK

SEQ ID NO: 20628 - protein, 6 aa, ARTIFICIAL SEQUENCE
  Synthetic Construct
TKSRDK

SEQ ID NO: 20629 - protein, 6 aa, ARTIFICIAL SEQUENCE
  Synthetic Construct
TKSREK

SEQ ID NO: 20630 - protein, 6 aa, ARTIFICIAL SEQUENCE
  Synthetic Construct
TKSRFK

SEQ ID NO: 20631 - protein, 6 aa, ARTIFICIAL SEQUENCE
  Synthetic Construct
TKSRGK

SEQ ID NO: 20632 - protein, 6 aa, ARTIFICIAL SEQUENCE
  Synthetic Construct
TKSRHK

SEQ ID NO: 20633 - protein, 6 aa, ARTIFICIAL SEQUENCE
  Synthetic Construct
TKSRIK

SEQ ID NO: 20634 - protein, 6 aa, ARTIFICIAL SEQUENCE
  Synthetic Construct
TKSRLK

SEQ ID NO: 20635 - protein, 6 aa, ARTIFICIAL SEQUENCE
  Synthetic Construct
TKSRNK

SEQ ID NO: 20636 - protein, 6 aa, ARTIFICIAL SEQUENCE
  Synthetic Construct
TKSRQK

SEQ ID NO: 20637 - protein, 6 aa, ARTIFICIAL SEQUENCE
  Synthetic Construct
TKSRRK

SEQ ID NO: 20638 - protein, 6 aa, ARTIFICIAL SEQUENCE
  Synthetic Construct
TKSRSK

SEQ ID NO: 20639 - protein, 6 aa, ARTIFICIAL SEQUENCE
  Synthetic Construct
TKSRTK

SEQ ID NO: 20640 - protein, 6 aa, ARTIFICIAL SEQUENCE
  Synthetic Construct
TKSRYK

SEQ ID NO: 20641 - protein, 6 aa, ARTIFICIAL SEQUENCE
  Synthetic Construct
TKSSAK

SEQ ID NO: 20642 - protein, 6 aa, ARTIFICIAL SEQUENCE
  Synthetic Construct
TKSSDK

SEQ ID NO: 20643 - protein, 6 aa, ARTIFICIAL SEQUENCE
  Synthetic Construct
TKSSEK

SEQ ID NO: 20644 - protein, 6 aa, ARTIFICIAL SEQUENCE
  Synthetic Construct
TKSSFK

SEQ ID NO: 20645 - protein, 6 aa, ARTIFICIAL SEQUENCE
  Synthetic Construct
TKSSGK

SEQ ID NO: 20646 - protein, 6 aa, ARTIFICIAL SEQUENCE
  Synthetic Construct
TKSSHK

SEQ ID NO: 20647 - protein, 6 aa, ARTIFICIAL SEQUENCE
  Synthetic Construct
TKSSIK

SEQ ID NO: 20648 - protein, 6 aa, ARTIFICIAL SEQUENCE
  Synthetic Construct
TKSSLK

SEQ ID NO: 20649 - protein, 6 aa, ARTIFICIAL SEQUENCE
  Synthetic Construct
TKSSNK

SEQ ID NO: 20650 - protein, 6 aa, ARTIFICIAL SEQUENCE
  Synthetic Construct
TKSSQK

SEQ ID NO: 20651 - protein, 6 aa, ARTIFICIAL SEQUENCE
  Synthetic Construct
TKSSRK

SEQ ID NO: 20652 - protein, 6 aa, ARTIFICIAL SEQUENCE
  Synthetic Construct
TKSSSK

SEQ ID NO: 20653 - protein, 6 aa, ARTIFICIAL SEQUENCE
  Synthetic Construct
TKSSTK

SEQ ID NO: 20654 - protein, 6 aa, ARTIFICIAL SEQUENCE
  Synthetic Construct
TKSSYK

SEQ ID NO: 20655 - protein, 6 aa, ARTIFICIAL SEQUENCE
  Synthetic Construct
TKSTAK

SEQ ID NO: 20656 - protein, 6 aa, ARTIFICIAL SEQUENCE
  Synthetic Construct
TKSTDK

SEQ ID NO: 20657 - protein, 6 aa, ARTIFICIAL SEQUENCE
  Synthetic Construct
TKSTEK

SEQ ID NO: 20658 - protein, 6 aa, ARTIFICIAL SEQUENCE
  Synthetic Construct
TKSTFK

SEQ ID NO: 20659 - protein, 6 aa, ARTIFICIAL SEQUENCE
  Synthetic Construct
TKSTGK

SEQ ID NO: 20660 - protein, 6 aa, ARTIFICIAL SEQUENCE
  Synthetic Construct
TKSTHK

SEQ ID NO: 20661 - protein, 6 aa, ARTIFICIAL SEQUENCE
  Synthetic Construct
TKSTIK

SEQ ID NO: 20662 - protein, 6 aa, ARTIFICIAL SEQUENCE
  Synthetic Construct
TKSTLK

SEQ ID NO: 20663 - protein, 6 aa, ARTIFICIAL SEQUENCE
  Synthetic Construct
TKSTNK

SEQ ID NO: 20664 - protein, 6 aa, ARTIFICIAL SEQUENCE
  Synthetic Construct
TKSTQK

SEQ ID NO: 20665 - protein, 6 aa, ARTIFICIAL SEQUENCE
  Synthetic Construct
TKSTRK

SEQ ID NO: 20666 - protein, 6 aa, ARTIFICIAL SEQUENCE
  Synthetic Construct
TKSTSK

SEQ ID NO: 20667 - protein, 6 aa, ARTIFICIAL SEQUENCE
  Synthetic Construct
TKSTTK

SEQ ID NO: 20668 - protein, 6 aa, ARTIFICIAL SEQUENCE
  Synthetic Construct
TKSTYK

SEQ ID NO: 20669 - protein, 6 aa, ARTIFICIAL SEQUENCE
  Synthetic Construct
TKSYAK

SEQ ID NO: 20670 - protein, 6 aa, ARTIFICIAL SEQUENCE
  Synthetic Construct
TKSYDK

SEQ ID NO: 20671 - protein, 6 aa, ARTIFICIAL SEQUENCE
  Synthetic Construct
TKSYEK

SEQ ID NO: 20672 - protein, 6 aa, ARTIFICIAL SEQUENCE
  Synthetic Construct
TKSYFK

SEQ ID NO: 20673 - protein, 6 aa, ARTIFICIAL SEQUENCE
  Synthetic Construct
TKSYGK

SEQ ID NO: 20674 - protein, 6 aa, ARTIFICIAL SEQUENCE
  Synthetic Construct
TKSYHK

SEQ ID NO: 20675 - protein, 6 aa, ARTIFICIAL SEQUENCE
  Synthetic Construct
TKSYIK

SEQ ID NO: 20676 - protein, 6 aa, ARTIFICIAL SEQUENCE
  Synthetic Construct
TKSYLK

SEQ ID NO: 20677 - protein, 6 aa, ARTIFICIAL SEQUENCE
  Synthetic Construct
TKSYNK

SEQ ID NO: 20678 - protein, 6 aa, ARTIFICIAL SEQUENCE
  Synthetic Construct
TKSYQK

SEQ ID NO: 20679 - protein, 6 aa, ARTIFICIAL SEQUENCE
  Synthetic Construct
TKSYRK

SEQ ID NO: 20680 - protein, 6 aa, ARTIFICIAL SEQUENCE
  Synthetic Construct
TKSYSK

SEQ ID NO: 20681 - protein, 6 aa, ARTIFICIAL SEQUENCE
  Synthetic Construct
TKSYTK

SEQ ID NO: 20682 - protein, 6 aa, ARTIFICIAL SEQUENCE
  Synthetic Construct
TKSYYK

SEQ ID NO: 20683 - protein, 6 aa, ARTIFICIAL SEQUENCE
  Synthetic Construct
TKTAAK

SEQ ID NO: 20684 - protein, 6 aa, ARTIFICIAL SEQUENCE
  Synthetic Construct
TKTADK

SEQ ID NO: 20685 - protein, 6 aa, ARTIFICIAL SEQUENCE
  Synthetic Construct
TKTAEK

SEQ ID NO: 20686 - protein, 6 aa, ARTIFICIAL SEQUENCE
  Synthetic Construct
TKTAFK

SEQ ID NO: 20687 - protein, 6 aa, ARTIFICIAL SEQUENCE
  Synthetic Construct
TKTAGK

SEQ ID NO: 20688 - protein, 6 aa, ARTIFICIAL SEQUENCE
  Synthetic Construct
TKTAHK

SEQ ID NO: 20689 - protein, 6 aa, ARTIFICIAL SEQUENCE
  Synthetic Construct
TKTAIK

SEQ ID NO: 20690 - protein, 6 aa, ARTIFICIAL SEQUENCE
  Synthetic Construct
TKTALK

SEQ ID NO: 20691 - protein, 6 aa, ARTIFICIAL SEQUENCE
  Synthetic Construct
TKTANK

SEQ ID NO: 20692 - protein, 6 aa, ARTIFICIAL SEQUENCE
  Synthetic Construct
TKTAQK

SEQ ID NO: 20693 - protein, 6 aa, ARTIFICIAL SEQUENCE
  Synthetic Construct
TKTARK

SEQ ID NO: 20694 - protein, 6 aa, ARTIFICIAL SEQUENCE
  Synthetic Construct
TKTASK

SEQ ID NO: 20695 - protein, 6 aa, ARTIFICIAL SEQUENCE
  Synthetic Construct
TKTATK

SEQ ID NO: 20696 - protein, 6 aa, ARTIFICIAL SEQUENCE
  Synthetic Construct
TKTAYK

SEQ ID NO: 20697 - protein, 6 aa, ARTIFICIAL SEQUENCE
  Synthetic Construct
TKTDAK

SEQ ID NO: 20698 - protein, 6 aa, ARTIFICIAL SEQUENCE
  Synthetic Construct
TKTDDK

SEQ ID NO: 20699 - protein, 6 aa, ARTIFICIAL SEQUENCE
  Synthetic Construct
TKTDEK

SEQ ID NO: 20700 - protein, 6 aa, ARTIFICIAL SEQUENCE
  Synthetic Construct
TKTDFK

SEQ ID NO: 20701 - protein, 6 aa, ARTIFICIAL SEQUENCE
  Synthetic Construct
TKTDGK

SEQ ID NO: 20702 - protein, 6 aa, ARTIFICIAL SEQUENCE
  Synthetic Construct
TKTDHK

SEQ ID NO: 20703 - protein, 6 aa, ARTIFICIAL SEQUENCE
  Synthetic Construct
TKTDIK

SEQ ID NO: 20704 - protein, 6 aa, ARTIFICIAL SEQUENCE
  Synthetic Construct
TKTDLK

SEQ ID NO: 20705 - protein, 6 aa, ARTIFICIAL SEQUENCE
  Synthetic Construct
TKTDNK

SEQ ID NO: 20706 - protein, 6 aa, ARTIFICIAL SEQUENCE
  Synthetic Construct
TKTDQK

SEQ ID NO: 20707 - protein, 6 aa, ARTIFICIAL SEQUENCE
  Synthetic Construct
TKTDRK

SEQ ID NO: 20708 - protein, 6 aa, ARTIFICIAL SEQUENCE
  Synthetic Construct
TKTDSK

SEQ ID NO: 20709 - protein, 6 aa, ARTIFICIAL SEQUENCE
  Synthetic Construct
TKTDTK

SEQ ID NO: 20710 - protein, 6 aa, ARTIFICIAL SEQUENCE
  Synthetic Construct
TKTDYK

SEQ ID NO: 20711 - protein, 6 aa, ARTIFICIAL SEQUENCE
  Synthetic Construct
TKTEAK

SEQ ID NO: 20712 - protein, 6 aa, ARTIFICIAL SEQUENCE
  Synthetic Construct
TKTEDK

SEQ ID NO: 20713 - protein, 6 aa, ARTIFICIAL SEQUENCE
  Synthetic Construct
TKTEEK

SEQ ID NO: 20714 - protein, 6 aa, ARTIFICIAL SEQUENCE
  Synthetic Construct
TKTEFK

SEQ ID NO: 20715 - protein, 6 aa, ARTIFICIAL SEQUENCE
  Synthetic Construct
TKTEGK

SEQ ID NO: 20716 - protein, 6 aa, ARTIFICIAL SEQUENCE
  Synthetic Construct
TKTEHK

SEQ ID NO: 20717 - protein, 6 aa, ARTIFICIAL SEQUENCE
  Synthetic Construct
TKTEIK

SEQ ID NO: 20718 - protein, 6 aa, ARTIFICIAL SEQUENCE
  Synthetic Construct
TKTELK

SEQ ID NO: 20719 - protein, 6 aa, ARTIFICIAL SEQUENCE
  Synthetic Construct
TKTENK

SEQ ID NO: 20720 - protein, 6 aa, ARTIFICIAL SEQUENCE
  Synthetic Construct
TKTEQK

SEQ ID NO: 20721 - protein, 6 aa, ARTIFICIAL SEQUENCE
  Synthetic Construct
TKTERK

SEQ ID NO: 20722 - protein, 6 aa, ARTIFICIAL SEQUENCE
  Synthetic Construct
TKTESK

SEQ ID NO: 20723 - protein, 6 aa, ARTIFICIAL SEQUENCE
  Synthetic Construct
TKTETK

SEQ ID NO: 20724 - protein, 6 aa, ARTIFICIAL SEQUENCE
  Synthetic Construct
TKTEYK

SEQ ID NO: 20725 - protein, 6 aa, ARTIFICIAL SEQUENCE
  Synthetic Construct
TKTFAK

SEQ ID NO: 20726 - protein, 6 aa, ARTIFICIAL SEQUENCE
  Synthetic Construct
TKTFDK

SEQ ID NO: 20727 - protein, 6 aa, ARTIFICIAL SEQUENCE
  Synthetic Construct
TKTFEK

SEQ ID NO: 20728 - protein, 6 aa, ARTIFICIAL SEQUENCE
  Synthetic Construct
TKTFFK

SEQ ID NO: 20729 - protein, 6 aa, ARTIFICIAL SEQUENCE
  Synthetic Construct
TKTFGK

SEQ ID NO: 20730 - protein, 6 aa, ARTIFICIAL SEQUENCE
  Synthetic Construct
TKTFHK

SEQ ID NO: 20731 - protein, 6 aa, ARTIFICIAL SEQUENCE
  Synthetic Construct
TKTFIK

SEQ ID NO: 20732 - protein, 6 aa, ARTIFICIAL SEQUENCE
  Synthetic Construct
TKTFLK

SEQ ID NO: 20733 - protein, 6 aa, ARTIFICIAL SEQUENCE
  Synthetic Construct
TKTFNK

SEQ ID NO: 20734 - protein, 6 aa, ARTIFICIAL SEQUENCE
  Synthetic Construct
TKTFQK

SEQ ID NO: 20735 - protein, 6 aa, ARTIFICIAL SEQUENCE
  Synthetic Construct
TKTFRK

SEQ ID NO: 20736 - protein, 6 aa, ARTIFICIAL SEQUENCE
  Synthetic Construct
TKTFSK

SEQ ID NO: 20737 - protein, 6 aa, ARTIFICIAL SEQUENCE
  Synthetic Construct
TKTFTK

SEQ ID NO: 20738 - protein, 6 aa, ARTIFICIAL SEQUENCE
  Synthetic Construct
TKTFYK

SEQ ID NO: 20739 - protein, 6 aa, ARTIFICIAL SEQUENCE
  Synthetic Construct
TKTGAK

SEQ ID NO: 20740 - protein, 6 aa, ARTIFICIAL SEQUENCE
  Synthetic Construct
TKTGDK

SEQ ID NO: 20741 - protein, 6 aa, ARTIFICIAL SEQUENCE
  Synthetic Construct
TKTGEK

SEQ ID NO: 20742 - protein, 6 aa, ARTIFICIAL SEQUENCE
  Synthetic Construct
TKTGFK

SEQ ID NO: 20743 - protein, 6 aa, ARTIFICIAL SEQUENCE
  Synthetic Construct
TKTGGK

SEQ ID NO: 20744 - protein, 6 aa, ARTIFICIAL SEQUENCE
  Synthetic Construct
TKTGHK

SEQ ID NO: 20745 - protein, 6 aa, ARTIFICIAL SEQUENCE
  Synthetic Construct
TKTGIK

SEQ ID NO: 20746 - protein, 6 aa, ARTIFICIAL SEQUENCE
  Synthetic Construct
TKTGLK

SEQ ID NO: 20747 - protein, 6 aa, ARTIFICIAL SEQUENCE
  Synthetic Construct
TKTGNK

SEQ ID NO: 20748 - protein, 6 aa, ARTIFICIAL SEQUENCE
  Synthetic Construct
TKTGQK

SEQ ID NO: 20749 - protein, 6 aa, ARTIFICIAL SEQUENCE
  Synthetic Construct
TKTGRK

SEQ ID NO: 20750 - protein, 6 aa, ARTIFICIAL SEQUENCE
  Synthetic Construct
TKTGSK

SEQ ID NO: 20751 - protein, 6 aa, ARTIFICIAL SEQUENCE
  Synthetic Construct
TKTGTK

SEQ ID NO: 20752 - protein, 6 aa, ARTIFICIAL SEQUENCE
  Synthetic Construct
TKTGYK

SEQ ID NO: 20753 - protein, 6 aa, ARTIFICIAL SEQUENCE
  Synthetic Construct
TKTHAK

SEQ ID NO: 20754 - protein, 6 aa, ARTIFICIAL SEQUENCE
  Synthetic Construct
TKTHDK

SEQ ID NO: 20755 - protein, 6 aa, ARTIFICIAL SEQUENCE
  Synthetic Construct
TKTHEK

SEQ ID NO: 20756 - protein, 6 aa, ARTIFICIAL SEQUENCE
  Synthetic Construct
TKTHFK

SEQ ID NO: 20757 - protein, 6 aa, ARTIFICIAL SEQUENCE
  Synthetic Construct
TKTHGK

SEQ ID NO: 20758 - protein, 6 aa, ARTIFICIAL SEQUENCE
  Synthetic Construct
TKTHHK

SEQ ID NO: 20759 - protein, 6 aa, ARTIFICIAL SEQUENCE
  Synthetic Construct
TKTHIK

SEQ ID NO: 20760 - protein, 6 aa, ARTIFICIAL SEQUENCE
  Synthetic Construct
TKTHLK

SEQ ID NO: 20761 - protein, 6 aa, ARTIFICIAL SEQUENCE
  Synthetic Construct
TKTHNK

SEQ ID NO: 20762 - protein, 6 aa, ARTIFICIAL SEQUENCE
  Synthetic Construct
TKTHQK

SEQ ID NO: 20763 - protein, 6 aa, ARTIFICIAL SEQUENCE
  Synthetic Construct
TKTHRK

SEQ ID NO: 20764 - protein, 6 aa, ARTIFICIAL SEQUENCE
  Synthetic Construct
TKTHSK

SEQ ID NO: 20765 - protein, 6 aa, ARTIFICIAL SEQUENCE
  Synthetic Construct
TKTHTK

SEQ ID NO: 20766 - protein, 6 aa, ARTIFICIAL SEQUENCE
  Synthetic Construct
TKTHYK

SEQ ID NO: 20767 - protein, 6 aa, ARTIFICIAL SEQUENCE
  Synthetic Construct
TKTIAK

SEQ ID NO: 20768 - protein, 6 aa, ARTIFICIAL SEQUENCE
  Synthetic Construct
TKTIDK

SEQ ID NO: 20769 - protein, 6 aa, ARTIFICIAL SEQUENCE
  Synthetic Construct
TKTIEK

SEQ ID NO: 20770 - protein, 6 aa, ARTIFICIAL SEQUENCE
  Synthetic Construct
TKTIFK

SEQ ID NO: 20771 - protein, 6 aa, ARTIFICIAL SEQUENCE
  Synthetic Construct
TKTIGK

SEQ ID NO: 20772 - protein, 6 aa, ARTIFICIAL SEQUENCE
  Synthetic Construct
TKTIHK

SEQ ID NO: 20773 - protein, 6 aa, ARTIFICIAL SEQUENCE
  Synthetic Construct
TKTIIK

SEQ ID NO: 20774 - protein, 6 aa, ARTIFICIAL SEQUENCE
  Synthetic Construct
TKTILK

SEQ ID NO: 20775 - protein, 6 aa, ARTIFICIAL SEQUENCE
  Synthetic Construct
TKTINK

SEQ ID NO: 20776 - protein, 6 aa, ARTIFICIAL SEQUENCE
  Synthetic Construct
TKTIQK

SEQ ID NO: 20777 - protein, 6 aa, ARTIFICIAL SEQUENCE
  Synthetic Construct
TKTIRK

SEQ ID NO: 20778 - protein, 6 aa, ARTIFICIAL SEQUENCE
  Synthetic Construct
TKTISK

SEQ ID NO: 20779 - protein, 6 aa, ARTIFICIAL SEQUENCE
  Synthetic Construct
TKTITK

SEQ ID NO: 20780 - protein, 6 aa, ARTIFICIAL SEQUENCE
  Synthetic Construct
TKTIYK

SEQ ID NO: 20781 - protein, 6 aa, ARTIFICIAL SEQUENCE
  Synthetic Construct
TKTLAK

SEQ ID NO: 20782 - protein, 6 aa, ARTIFICIAL SEQUENCE
  Synthetic Construct
TKTLDK

SEQ ID NO: 20783 - protein, 6 aa, ARTIFICIAL SEQUENCE
  Synthetic Construct
TKTLEK

SEQ ID NO: 20784 - protein, 6 aa, ARTIFICIAL SEQUENCE
  Synthetic Construct
TKTLFK

SEQ ID NO: 20785 - protein, 6 aa, ARTIFICIAL SEQUENCE
  Synthetic Construct
TKTLGK

SEQ ID NO: 20786 - protein, 6 aa, ARTIFICIAL SEQUENCE
  Synthetic Construct
TKTLHK

SEQ ID NO: 20787 - protein, 6 aa, ARTIFICIAL SEQUENCE
  Synthetic Construct
TKTLIK

SEQ ID NO: 20788 - protein, 6 aa, ARTIFICIAL SEQUENCE
  Synthetic Construct
TKTLLK

SEQ ID NO: 20789 - protein, 6 aa, ARTIFICIAL SEQUENCE
  Synthetic Construct
TKTLNK

SEQ ID NO: 20790 - protein, 6 aa, ARTIFICIAL SEQUENCE
  Synthetic Construct
TKTLQK

SEQ ID NO: 20791 - protein, 6 aa, ARTIFICIAL SEQUENCE
  Synthetic Construct
TKTLRK

SEQ ID NO: 20792 - protein, 6 aa, ARTIFICIAL SEQUENCE
  Synthetic Construct
TKTLSK

SEQ ID NO: 20793 - protein, 6 aa, ARTIFICIAL SEQUENCE
  Synthetic Construct
TKTLTK

SEQ ID NO: 20794 - protein, 6 aa, ARTIFICIAL SEQUENCE
  Synthetic Construct
TKTLYK

SEQ ID NO: 20795 - protein, 6 aa, ARTIFICIAL SEQUENCE
  Synthetic Construct
TKTNAK

SEQ ID NO: 20796 - protein, 6 aa, ARTIFICIAL SEQUENCE
  Synthetic Construct
TKTNDK

SEQ ID NO: 20797 - protein, 6 aa, ARTIFICIAL SEQUENCE
  Synthetic Construct
TKTNEK

SEQ ID NO: 20798 - protein, 6 aa, ARTIFICIAL SEQUENCE
  Synthetic Construct
TKTNFK

SEQ ID NO: 20799 - protein, 6 aa, ARTIFICIAL SEQUENCE
  Synthetic Construct
TKTNGK

SEQ ID NO: 20800 - protein, 6 aa, ARTIFICIAL SEQUENCE
  Synthetic Construct
TKTNHK

SEQ ID NO: 20801 - protein, 6 aa, ARTIFICIAL SEQUENCE
  Synthetic Construct
TKTNIK

SEQ ID NO: 20802 - protein, 6 aa, ARTIFICIAL SEQUENCE
  Synthetic Construct
TKTNLK

SEQ ID NO: 20803 - protein, 6 aa, ARTIFICIAL SEQUENCE
  Synthetic Construct
TKTNNK

SEQ ID NO: 20804 - protein, 6 aa, ARTIFICIAL SEQUENCE
  Synthetic Construct
TKTNQK

SEQ ID NO: 20805 - protein, 6 aa, ARTIFICIAL SEQUENCE
  Synthetic Construct
TKTNRK

SEQ ID NO: 20806 - protein, 6 aa, ARTIFICIAL SEQUENCE
  Synthetic Construct
TKTNSK

SEQ ID NO: 20807 - protein, 6 aa, ARTIFICIAL SEQUENCE
  Synthetic Construct
TKTNTK

SEQ ID NO: 20808 - protein, 6 aa, ARTIFICIAL SEQUENCE
  Synthetic Construct
TKTNYK

SEQ ID NO: 20809 - protein, 6 aa, ARTIFICIAL SEQUENCE
  Synthetic Construct
TKTQAK

SEQ ID NO: 20810 - protein, 6 aa, ARTIFICIAL SEQUENCE
  Synthetic Construct
TKTQDK

SEQ ID NO: 20811 - protein, 6 aa, ARTIFICIAL SEQUENCE
  Synthetic Construct
TKTQEK

SEQ ID NO: 20812 - protein, 6 aa, ARTIFICIAL SEQUENCE
  Synthetic Construct
TKTQFK

SEQ ID NO: 20813 - protein, 6 aa, ARTIFICIAL SEQUENCE
  Synthetic Construct
TKTQGK

SEQ ID NO: 20814 - protein, 6 aa, ARTIFICIAL SEQUENCE
  Synthetic Construct
TKTQHK

SEQ ID NO: 20815 - protein, 6 aa, ARTIFICIAL SEQUENCE
  Synthetic Construct
TKTQIK

SEQ ID NO: 20816 - protein, 6 aa, ARTIFICIAL SEQUENCE
  Synthetic Construct
TKTQLK

SEQ ID NO: 20817 - protein, 6 aa, ARTIFICIAL SEQUENCE
  Synthetic Construct
TKTQNK

SEQ ID NO: 20818 - protein, 6 aa, ARTIFICIAL SEQUENCE
  Synthetic Construct
TKTQQK

SEQ ID NO: 20819 - protein, 6 aa, ARTIFICIAL SEQUENCE
  Synthetic Construct
TKTQRK

SEQ ID NO: 20820 - protein, 6 aa, ARTIFICIAL SEQUENCE
  Synthetic Construct
TKTQSK

SEQ ID NO: 20821 - protein, 6 aa, ARTIFICIAL SEQUENCE
  Synthetic Construct
TKTQTK

SEQ ID NO: 20822 - protein, 6 aa, ARTIFICIAL SEQUENCE
  Synthetic Construct
TKTQYK

SEQ ID NO: 20823 - protein, 6 aa, ARTIFICIAL SEQUENCE
  Synthetic Construct
TKTRAK

SEQ ID NO: 20824 - protein, 6 aa, ARTIFICIAL SEQUENCE
  Synthetic Construct
TKTRDK

SEQ ID NO: 20825 - protein, 6 aa, ARTIFICIAL SEQUENCE
  Synthetic Construct
TKTREK

SEQ ID NO: 20826 - protein, 6 aa, ARTIFICIAL SEQUENCE
  Synthetic Construct
TKTRFK

SEQ ID NO: 20827 - protein, 6 aa, ARTIFICIAL SEQUENCE
  Synthetic Construct
TKTRGK

SEQ ID NO: 20828 - protein, 6 aa, ARTIFICIAL SEQUENCE
  Synthetic Construct
TKTRHK

SEQ ID NO: 20829 - protein, 6 aa, ARTIFICIAL SEQUENCE
  Synthetic Construct
TKTRIK

SEQ ID NO: 20830 - protein, 6 aa, ARTIFICIAL SEQUENCE
  Synthetic Construct
TKTRLK

SEQ ID NO: 20831 - protein, 6 aa, ARTIFICIAL SEQUENCE
  Synthetic Construct
TKTRNK

SEQ ID NO: 20832 - protein, 6 aa, ARTIFICIAL SEQUENCE
  Synthetic Construct
TKTRQK

SEQ ID NO: 20833 - protein, 6 aa, ARTIFICIAL SEQUENCE
  Synthetic Construct
TKTRRK

SEQ ID NO: 20834 - protein, 6 aa, ARTIFICIAL SEQUENCE
  Synthetic Construct
TKTRSK

SEQ ID NO: 20835 - protein, 6 aa, ARTIFICIAL SEQUENCE
  Synthetic Construct
TKTRTK

SEQ ID NO: 20836 - protein, 6 aa, ARTIFICIAL SEQUENCE
  Synthetic Construct
TKTRYK

SEQ ID NO: 20837 - protein, 6 aa, ARTIFICIAL SEQUENCE
  Synthetic Construct
TKTSAK

SEQ ID NO: 20838 - protein, 6 aa, ARTIFICIAL SEQUENCE
  Synthetic Construct
TKTSDK

SEQ ID NO: 20839 - protein, 6 aa, ARTIFICIAL SEQUENCE
  Synthetic Construct
TKTSEK

SEQ ID NO: 20840 - protein, 6 aa, ARTIFICIAL SEQUENCE
  Synthetic Construct
TKTSFK

SEQ ID NO: 20841 - protein, 6 aa, ARTIFICIAL SEQUENCE
  Synthetic Construct
TKTSGK

SEQ ID NO: 20842 - protein, 6 aa, ARTIFICIAL SEQUENCE
  Synthetic Construct
TKTSHK

SEQ ID NO: 20843 - protein, 6 aa, ARTIFICIAL SEQUENCE
  Synthetic Construct
TKTSIK

SEQ ID NO: 20844 - protein, 6 aa, ARTIFICIAL SEQUENCE
  Synthetic Construct
TKTSLK

SEQ ID NO: 20845 - protein, 6 aa, ARTIFICIAL SEQUENCE
  Synthetic Construct
TKTSNK

SEQ ID NO: 20846 - protein, 6 aa, ARTIFICIAL SEQUENCE
  Synthetic Construct
TKTSQK

SEQ ID NO: 20847 - protein, 6 aa, ARTIFICIAL SEQUENCE
  Synthetic Construct
TKTSRK

SEQ ID NO: 20848 - protein, 6 aa, ARTIFICIAL SEQUENCE
  Synthetic Construct
TKTSSK

SEQ ID NO: 20849 - protein, 6 aa, ARTIFICIAL SEQUENCE
  Synthetic Construct
TKTSTK

SEQ ID NO: 20850 - protein, 6 aa, ARTIFICIAL SEQUENCE
  Synthetic Construct
TKTSYK

SEQ ID NO: 20851 - protein, 6 aa, ARTIFICIAL SEQUENCE
  Synthetic Construct
TKTTAK

SEQ ID NO: 20852 - protein, 6 aa, ARTIFICIAL SEQUENCE
  Synthetic Construct
TKTTDK

SEQ ID NO: 20853 - protein, 6 aa, ARTIFICIAL SEQUENCE
  Synthetic Construct
TKTTEK

SEQ ID NO: 20854 - protein, 6 aa, ARTIFICIAL SEQUENCE
  Synthetic Construct
TKTTFK

SEQ ID NO: 20855 - protein, 6 aa, ARTIFICIAL SEQUENCE
  Synthetic Construct
TKTTGK

SEQ ID NO: 20856 - protein, 6 aa, ARTIFICIAL SEQUENCE
  Synthetic Construct
TKTTHK

SEQ ID NO: 20857 - protein, 6 aa, ARTIFICIAL SEQUENCE
  Synthetic Construct
TKTTIK

SEQ ID NO: 20858 - protein, 6 aa, ARTIFICIAL SEQUENCE
  Synthetic Construct
TKTTLK

SEQ ID NO: 20859 - protein, 6 aa, ARTIFICIAL SEQUENCE
  Synthetic Construct
TKTTNK

SEQ ID NO: 20860 - protein, 6 aa, ARTIFICIAL SEQUENCE
  Synthetic Construct
TKTTQK

SEQ ID NO: 20861 - protein, 6 aa, ARTIFICIAL SEQUENCE
  Synthetic Construct
TKTTRK

SEQ ID NO: 20862 - protein, 6 aa, ARTIFICIAL SEQUENCE
  Synthetic Construct
TKTTSK

SEQ ID NO: 20863 - protein, 6 aa, ARTIFICIAL SEQUENCE
  Synthetic Construct
TKTTTK

SEQ ID NO: 20864 - protein, 6 aa, ARTIFICIAL SEQUENCE
  Synthetic Construct
TKTTYK

SEQ ID NO: 20865 - protein, 6 aa, ARTIFICIAL SEQUENCE
  Synthetic Construct
TKTYAK

SEQ ID NO: 20866 - protein, 6 aa, ARTIFICIAL SEQUENCE
  Synthetic Construct
TKTYDK

SEQ ID NO: 20867 - protein, 6 aa, ARTIFICIAL SEQUENCE
  Synthetic Construct
TKTYEK

SEQ ID NO: 20868 - protein, 6 aa, ARTIFICIAL SEQUENCE
  Synthetic Construct
TKTYFK

SEQ ID NO: 20869 - protein, 6 aa, ARTIFICIAL SEQUENCE
  Synthetic Construct
TKTYGK

SEQ ID NO: 20870 - protein, 6 aa, ARTIFICIAL SEQUENCE
  Synthetic Construct
TKTYHK

SEQ ID NO: 20871 - protein, 6 aa, ARTIFICIAL SEQUENCE
  Synthetic Construct
TKTYIK

SEQ ID NO: 20872 - protein, 6 aa, ARTIFICIAL SEQUENCE
  Synthetic Construct
TKTYLK

SEQ ID NO: 20873 - protein, 6 aa, ARTIFICIAL SEQUENCE
  Synthetic Construct
TKTYNK

SEQ ID NO: 20874 - protein, 6 aa, ARTIFICIAL SEQUENCE
  Synthetic Construct
TKTYQK

SEQ ID NO: 20875 - protein, 6 aa, ARTIFICIAL SEQUENCE
  Synthetic Construct
TKTYRK

SEQ ID NO: 20876 - protein, 6 aa, ARTIFICIAL SEQUENCE
  Synthetic Construct
TKTYSK

SEQ ID NO: 20877 - protein, 6 aa, ARTIFICIAL SEQUENCE
  Synthetic Construct
TKTYTK

SEQ ID NO: 20878 - protein, 6 aa, ARTIFICIAL SEQUENCE
  Synthetic Construct
TKTYYK

SEQ ID NO: 20879 - protein, 6 aa, ARTIFICIAL SEQUENCE
  Synthetic Construct
TKYAAK

SEQ ID NO: 20880 - protein, 6 aa, ARTIFICIAL SEQUENCE
  Synthetic Construct
TKYADK

SEQ ID NO: 20881 - protein, 6 aa, ARTIFICIAL SEQUENCE
  Synthetic Construct
TKYAEK

SEQ ID NO: 20882 - protein, 6 aa, ARTIFICIAL SEQUENCE
  Synthetic Construct
TKYAFK

SEQ ID NO: 20883 - protein, 6 aa, ARTIFICIAL SEQUENCE
  Synthetic Construct
TKYAGK

SEQ ID NO: 20884 - protein, 6 aa, ARTIFICIAL SEQUENCE
  Synthetic Construct
TKYAHK

SEQ ID NO: 20885 - protein, 6 aa, ARTIFICIAL SEQUENCE
  Synthetic Construct
TKYAIK

SEQ ID NO: 20886 - protein, 6 aa, ARTIFICIAL SEQUENCE
  Synthetic Construct
TKYALK

SEQ ID NO: 20887 - protein, 6 aa, ARTIFICIAL SEQUENCE
  Synthetic Construct
TKYANK

SEQ ID NO: 20888 - protein, 6 aa, ARTIFICIAL SEQUENCE
  Synthetic Construct
TKYAQK

SEQ ID NO: 20889 - protein, 6 aa, ARTIFICIAL SEQUENCE
  Synthetic Construct
TKYARK

SEQ ID NO: 20890 - protein, 6 aa, ARTIFICIAL SEQUENCE
  Synthetic Construct
TKYASK

SEQ ID NO: 20891 - protein, 6 aa, ARTIFICIAL SEQUENCE
  Synthetic Construct
TKYATK

SEQ ID NO: 20892 - protein, 6 aa, ARTIFICIAL SEQUENCE
  Synthetic Construct
TKYAYK

SEQ ID NO: 20893 - protein, 6 aa, ARTIFICIAL SEQUENCE
  Synthetic Construct
TKYDAK

SEQ ID NO: 20894 - protein, 6 aa, ARTIFICIAL SEQUENCE
  Synthetic Construct
TKYDDK

SEQ ID NO: 20895 - protein, 6 aa, ARTIFICIAL SEQUENCE
  Synthetic Construct
TKYDEK

SEQ ID NO: 20896 - protein, 6 aa, ARTIFICIAL SEQUENCE
  Synthetic Construct
TKYDFK

SEQ ID NO: 20897 - protein, 6 aa, ARTIFICIAL SEQUENCE
  Synthetic Construct
TKYDGK

SEQ ID NO: 20898 - protein, 6 aa, ARTIFICIAL SEQUENCE
  Synthetic Construct
TKYDHK

SEQ ID NO: 20899 - protein, 6 aa, ARTIFICIAL SEQUENCE
  Synthetic Construct
TKYDIK

SEQ ID NO: 20900 - protein, 6 aa, ARTIFICIAL SEQUENCE
  Synthetic Construct
TKYDLK

SEQ ID NO: 20901 - protein, 6 aa, ARTIFICIAL SEQUENCE
  Synthetic Construct
TKYDNK

SEQ ID NO: 20902 - protein, 6 aa, ARTIFICIAL SEQUENCE
  Synthetic Construct
TKYDQK

SEQ ID NO: 20903 - protein, 6 aa, ARTIFICIAL SEQUENCE
  Synthetic Construct
TKYDRK

SEQ ID NO: 20904 - protein, 6 aa, ARTIFICIAL SEQUENCE
  Synthetic Construct
TKYDSK

SEQ ID NO: 20905 - protein, 6 aa, ARTIFICIAL SEQUENCE
  Synthetic Construct
TKYDTK

SEQ ID NO: 20906 - protein, 6 aa, ARTIFICIAL SEQUENCE
  Synthetic Construct
TKYDYK

SEQ ID NO: 20907 - protein, 6 aa, ARTIFICIAL SEQUENCE
  Synthetic Construct
TKYEAK

SEQ ID NO: 20908 - protein, 6 aa, ARTIFICIAL SEQUENCE
  Synthetic Construct
TKYEDK

SEQ ID NO: 20909 - protein, 6 aa, ARTIFICIAL SEQUENCE
  Synthetic Construct
TKYEEK

SEQ ID NO: 20910 - protein, 6 aa, ARTIFICIAL SEQUENCE
  Synthetic Construct
TKYEFK

SEQ ID NO: 20911 - protein, 6 aa, ARTIFICIAL SEQUENCE
  Synthetic Construct
TKYEGK

SEQ ID NO: 20912 - protein, 6 aa, ARTIFICIAL SEQUENCE
  Synthetic Construct
TKYEHK

SEQ ID NO: 20913 - protein, 6 aa, ARTIFICIAL SEQUENCE
  Synthetic Construct
TKYEIK

SEQ ID NO: 20914 - protein, 6 aa, ARTIFICIAL SEQUENCE
  Synthetic Construct
TKYELK

SEQ ID NO: 20915 - protein, 6 aa, ARTIFICIAL SEQUENCE
  Synthetic Construct
TKYENK

SEQ ID NO: 20916 - protein, 6 aa, ARTIFICIAL SEQUENCE
  Synthetic Construct
TKYEQK

SEQ ID NO: 20917 - protein, 6 aa, ARTIFICIAL SEQUENCE
  Synthetic Construct
TKYERK

SEQ ID NO: 20918 - protein, 6 aa, ARTIFICIAL SEQUENCE
  Synthetic Construct
TKYESK

SEQ ID NO: 20919 - protein, 6 aa, ARTIFICIAL SEQUENCE
  Synthetic Construct
TKYETK

SEQ ID NO: 20920 - protein, 6 aa, ARTIFICIAL SEQUENCE
  Synthetic Construct
TKYEYK

SEQ ID NO: 20921 - protein, 6 aa, ARTIFICIAL SEQUENCE
  Synthetic Construct
TKYFAK

SEQ ID NO: 20922 - protein, 6 aa, ARTIFICIAL SEQUENCE
  Synthetic Construct
TKYFDK

SEQ ID NO: 20923 - protein, 6 aa, ARTIFICIAL SEQUENCE
  Synthetic Construct
TKYFEK

SEQ ID NO: 20924 - protein, 6 aa, ARTIFICIAL SEQUENCE
  Synthetic Construct
TKYFFK

SEQ ID NO: 20925 - protein, 6 aa, ARTIFICIAL SEQUENCE
  Synthetic Construct
TKYFGK

SEQ ID NO: 20926 - protein, 6 aa, ARTIFICIAL SEQUENCE
  Synthetic Construct
TKYFHK

SEQ ID NO: 20927 - protein, 6 aa, ARTIFICIAL SEQUENCE
  Synthetic Construct
TKYFIK

SEQ ID NO: 20928 - protein, 6 aa, ARTIFICIAL SEQUENCE
  Synthetic Construct
TKYFLK

SEQ ID NO: 20929 - protein, 6 aa, ARTIFICIAL SEQUENCE
  Synthetic Construct
TKYFNK

SEQ ID NO: 20930 - protein, 6 aa, ARTIFICIAL SEQUENCE
  Synthetic Construct
TKYFQK

SEQ ID NO: 20931 - protein, 6 aa, ARTIFICIAL SEQUENCE
  Synthetic Construct
TKYFRK

SEQ ID NO: 20932 - protein, 6 aa, ARTIFICIAL SEQUENCE
  Synthetic Construct
TKYFSK

SEQ ID NO: 20933 - protein, 6 aa, ARTIFICIAL SEQUENCE
  Synthetic Construct
TKYFTK

SEQ ID NO: 20934 - protein, 6 aa, ARTIFICIAL SEQUENCE
  Synthetic Construct
TKYFYK

SEQ ID NO: 20935 - protein, 6 aa, ARTIFICIAL SEQUENCE
  Synthetic Construct
TKYGAK

SEQ ID NO: 20936 - protein, 6 aa, ARTIFICIAL SEQUENCE
  Synthetic Construct
TKYGDK

SEQ ID NO: 20937 - protein, 6 aa, ARTIFICIAL SEQUENCE
  Synthetic Construct
TKYGEK

SEQ ID NO: 20938 - protein, 6 aa, ARTIFICIAL SEQUENCE
  Synthetic Construct
TKYGFK

SEQ ID NO: 20939 - protein, 6 aa, ARTIFICIAL SEQUENCE
  Synthetic Construct
TKYGGK

SEQ ID NO: 20940 - protein, 6 aa, ARTIFICIAL SEQUENCE
  Synthetic Construct
TKYGHK

SEQ ID NO: 20941 - protein, 6 aa, ARTIFICIAL SEQUENCE
  Synthetic Construct
TKYGIK

SEQ ID NO: 20942 - protein, 6 aa, ARTIFICIAL SEQUENCE
  Synthetic Construct
TKYGLK

SEQ ID NO: 20943 - protein, 6 aa, ARTIFICIAL SEQUENCE
  Synthetic Construct
TKYGNK

SEQ ID NO: 20944 - protein, 6 aa, ARTIFICIAL SEQUENCE
  Synthetic Construct
TKYGQK

SEQ ID NO: 20945 - protein, 6 aa, ARTIFICIAL SEQUENCE
  Synthetic Construct
TKYGRK

SEQ ID NO: 20946 - protein, 6 aa, ARTIFICIAL SEQUENCE
  Synthetic Construct
TKYGSK

SEQ ID NO: 20947 - protein, 6 aa, ARTIFICIAL SEQUENCE
  Synthetic Construct
TKYGTK

SEQ ID NO: 20948 - protein, 6 aa, ARTIFICIAL SEQUENCE
  Synthetic Construct
TKYGYK

SEQ ID NO: 20949 - protein, 6 aa, ARTIFICIAL SEQUENCE
  Synthetic Construct
TKYHAK

SEQ ID NO: 20950 - protein, 6 aa, ARTIFICIAL SEQUENCE
  Synthetic Construct
TKYHDK

SEQ ID NO: 20951 - protein, 6 aa, ARTIFICIAL SEQUENCE
  Synthetic Construct
TKYHEK

SEQ ID NO: 20952 - protein, 6 aa, ARTIFICIAL SEQUENCE
  Synthetic Construct
TKYHFK

SEQ ID NO: 20953 - protein, 6 aa, ARTIFICIAL SEQUENCE
  Synthetic Construct
TKYHGK

SEQ ID NO: 20954 - protein, 6 aa, ARTIFICIAL SEQUENCE
  Synthetic Construct
TKYHHK

SEQ ID NO: 20955 - protein, 6 aa, ARTIFICIAL SEQUENCE
  Synthetic Construct
TKYHIK

SEQ ID NO: 20956 - protein, 6 aa, ARTIFICIAL SEQUENCE
  Synthetic Construct
TKYHLK

SEQ ID NO: 20957 - protein, 6 aa, ARTIFICIAL SEQUENCE
  Synthetic Construct
TKYHNK

SEQ ID NO: 20958 - protein, 6 aa, ARTIFICIAL SEQUENCE
  Synthetic Construct
TKYHQK

SEQ ID NO: 20959 - protein, 6 aa, ARTIFICIAL SEQUENCE
  Synthetic Construct
TKYHRK

SEQ ID NO: 20960 - protein, 6 aa, ARTIFICIAL SEQUENCE
  Synthetic Construct
TKYHSK

SEQ ID NO: 20961 - protein, 6 aa, ARTIFICIAL SEQUENCE
  Synthetic Construct
TKYHTK

SEQ ID NO: 20962 - protein, 6 aa, ARTIFICIAL SEQUENCE
  Synthetic Construct
TKYHYK

SEQ ID NO: 20963 - protein, 6 aa, ARTIFICIAL SEQUENCE
  Synthetic Construct
TKYIAK

SEQ ID NO: 20964 - protein, 6 aa, ARTIFICIAL SEQUENCE
  Synthetic Construct
TKYIDK

SEQ ID NO: 20965 - protein, 6 aa, ARTIFICIAL SEQUENCE
  Synthetic Construct
TKYIEK

SEQ ID NO: 20966 - protein, 6 aa, ARTIFICIAL SEQUENCE
  Synthetic Construct
TKYIFK

SEQ ID NO: 20967 - protein, 6 aa, ARTIFICIAL SEQUENCE
  Synthetic Construct
TKYIGK

SEQ ID NO: 20968 - protein, 6 aa, ARTIFICIAL SEQUENCE
  Synthetic Construct
TKYIHK

SEQ ID NO: 20969 - protein, 6 aa, ARTIFICIAL SEQUENCE
  Synthetic Construct
TKYIIK

SEQ ID NO: 20970 - protein, 6 aa, ARTIFICIAL SEQUENCE
  Synthetic Construct
TKYILK

SEQ ID NO: 20971 - protein, 6 aa, ARTIFICIAL SEQUENCE
  Synthetic Construct
TKYINK

SEQ ID NO: 20972 - protein, 6 aa, ARTIFICIAL SEQUENCE
  Synthetic Construct
TKYIQK

SEQ ID NO: 20973 - protein, 6 aa, ARTIFICIAL SEQUENCE
  Synthetic Construct
TKYIRK

SEQ ID NO: 20974 - protein, 6 aa, ARTIFICIAL SEQUENCE
  Synthetic Construct
TKYISK

SEQ ID NO: 20975 - protein, 6 aa, ARTIFICIAL SEQUENCE
  Synthetic Construct
TKYITK

SEQ ID NO: 20976 - protein, 6 aa, ARTIFICIAL SEQUENCE
  Synthetic Construct
TKYIYK

SEQ ID NO: 20977 - protein, 6 aa, ARTIFICIAL SEQUENCE
  Synthetic Construct
TKYLAK

SEQ ID NO: 20978 - protein, 6 aa, ARTIFICIAL SEQUENCE
  Synthetic Construct
TKYLDK

SEQ ID NO: 20979 - protein, 6 aa, ARTIFICIAL SEQUENCE
  Synthetic Construct
TKYLEK

SEQ ID NO: 20980 - protein, 6 aa, ARTIFICIAL SEQUENCE
  Synthetic Construct
TKYLFK

SEQ ID NO: 20981 - protein, 6 aa, ARTIFICIAL SEQUENCE
  Synthetic Construct
TKYLGK

SEQ ID NO: 20982 - protein, 6 aa, ARTIFICIAL SEQUENCE
  Synthetic Construct
TKYLHK

SEQ ID NO: 20983 - protein, 6 aa, ARTIFICIAL SEQUENCE
  Synthetic Construct
TKYLIK

SEQ ID NO: 20984 - protein, 6 aa, ARTIFICIAL SEQUENCE
  Synthetic Construct
TKYLLK

SEQ ID NO: 20985 - protein, 6 aa, ARTIFICIAL SEQUENCE
  Synthetic Construct
TKYLNK

SEQ ID NO: 20986 - protein, 6 aa, ARTIFICIAL SEQUENCE
  Synthetic Construct
TKYLQK

SEQ ID NO: 20987 - protein, 6 aa, ARTIFICIAL SEQUENCE
  Synthetic Construct
TKYLRK

SEQ ID NO: 20988 - protein, 6 aa, ARTIFICIAL SEQUENCE
  Synthetic Construct
TKYLSK

SEQ ID NO: 20989 - protein, 6 aa, ARTIFICIAL SEQUENCE
  Synthetic Construct
TKYLTK

SEQ ID NO: 20990 - protein, 6 aa, ARTIFICIAL SEQUENCE
  Synthetic Construct
TKYLYK

SEQ ID NO: 20991 - protein, 6 aa, ARTIFICIAL SEQUENCE
  Synthetic Construct
TKYNAK

SEQ ID NO: 20992 - protein, 6 aa, ARTIFICIAL SEQUENCE
  Synthetic Construct
TKYNDK

SEQ ID NO: 20993 - protein, 6 aa, ARTIFICIAL SEQUENCE
  Synthetic Construct
TKYNEK

SEQ ID NO: 20994 - protein, 6 aa, ARTIFICIAL SEQUENCE
  Synthetic Construct
TKYNFK

SEQ ID NO: 20995 - protein, 6 aa, ARTIFICIAL SEQUENCE
  Synthetic Construct
TKYNGK

SEQ ID NO: 20996 - protein, 6 aa, ARTIFICIAL SEQUENCE
  Synthetic Construct
TKYNHK

SEQ ID NO: 20997 - protein, 6 aa, ARTIFICIAL SEQUENCE
  Synthetic Construct
TKYNIK

SEQ ID NO: 20998 - protein, 6 aa, ARTIFICIAL SEQUENCE
  Synthetic Construct
TKYNLK

SEQ ID NO: 20999 - protein, 6 aa, ARTIFICIAL SEQUENCE
  Synthetic Construct
TKYNNK

SEQ ID NO: 21000 - protein, 6 aa, ARTIFICIAL SEQUENCE
  Synthetic Construct
TKYNQK

SEQ ID NO: 21001 - protein, 6 aa, ARTIFICIAL SEQUENCE
  Synthetic Construct
TKYNRK

SEQ ID NO: 21002 - protein, 6 aa, ARTIFICIAL SEQUENCE
  Synthetic Construct
TKYNSK

SEQ ID NO: 21003 - protein, 6 aa, ARTIFICIAL SEQUENCE
  Synthetic Construct
TKYNTK

SEQ ID NO: 21004 - protein, 6 aa, ARTIFICIAL SEQUENCE
  Synthetic Construct
TKYNYK

SEQ ID NO: 21005 - protein, 6 aa, ARTIFICIAL SEQUENCE
  Synthetic Construct
TKYQAK

SEQ ID NO: 21006 - protein, 6 aa, ARTIFICIAL SEQUENCE
  Synthetic Construct
TKYQDK

SEQ ID NO: 21007 - protein, 6 aa, ARTIFICIAL SEQUENCE
  Synthetic Construct
TKYQEK

SEQ ID NO: 21008 - protein, 6 aa, ARTIFICIAL SEQUENCE
  Synthetic Construct
TKYQFK

SEQ ID NO: 21009 - protein, 6 aa, ARTIFICIAL SEQUENCE
  Synthetic Construct
TKYQGK

SEQ ID NO: 21010 - protein, 6 aa, ARTIFICIAL SEQUENCE
  Synthetic Construct
TKYQHK

SEQ ID NO: 21011 - protein, 6 aa, ARTIFICIAL SEQUENCE
  Synthetic Construct
TKYQIK

SEQ ID NO: 21012 - protein, 6 aa, ARTIFICIAL SEQUENCE
  Synthetic Construct
TKYQLK

SEQ ID NO: 21013 - protein, 6 aa, ARTIFICIAL SEQUENCE
  Synthetic Construct
TKYQNK

SEQ ID NO: 21014 - protein, 6 aa, ARTIFICIAL SEQUENCE
  Synthetic Construct
TKYQQK

SEQ ID NO: 21015 - protein, 6 aa, ARTIFICIAL SEQUENCE
  Synthetic Construct
TKYQRK

SEQ ID NO: 21016 - protein, 6 aa, ARTIFICIAL SEQUENCE
  Synthetic Construct
TKYQSK

SEQ ID NO: 21017 - protein, 6 aa, ARTIFICIAL SEQUENCE
  Synthetic Construct
TKYQTK

SEQ ID NO: 21018 - protein, 6 aa, ARTIFICIAL SEQUENCE
  Synthetic Construct
TKYQYK

SEQ ID NO: 21019 - protein, 6 aa, ARTIFICIAL SEQUENCE
  Synthetic Construct
TKYRAK

SEQ ID NO: 21020 - protein, 6 aa, ARTIFICIAL SEQUENCE
  Synthetic Construct
TKYRDK

SEQ ID NO: 21021 - protein, 6 aa, ARTIFICIAL SEQUENCE
  Synthetic Construct
TKYREK

SEQ ID NO: 21022 - protein, 6 aa, ARTIFICIAL SEQUENCE
  Synthetic Construct
TKYRFK

SEQ ID NO: 21023 - protein, 6 aa, ARTIFICIAL SEQUENCE
  Synthetic Construct
TKYRGK

SEQ ID NO: 21024 - protein, 6 aa, ARTIFICIAL SEQUENCE
  Synthetic Construct
TKYRHK

SEQ ID NO: 21025 - protein, 6 aa, ARTIFICIAL SEQUENCE
  Synthetic Construct
TKYRIK

SEQ ID NO: 21026 - protein, 6 aa, ARTIFICIAL SEQUENCE
  Synthetic Construct
TKYRLK

SEQ ID NO: 21027 - protein, 6 aa, ARTIFICIAL SEQUENCE
  Synthetic Construct
TKYRNK

SEQ ID NO: 21028 - protein, 6 aa, ARTIFICIAL SEQUENCE
  Synthetic Construct
TKYRQK

SEQ ID NO: 21029 - protein, 6 aa, ARTIFICIAL SEQUENCE
  Synthetic Construct
TKYRRK

SEQ ID NO: 21030 - protein, 6 aa, ARTIFICIAL SEQUENCE
  Synthetic Construct
TKYRSK

SEQ ID NO: 21031 - protein, 6 aa, ARTIFICIAL SEQUENCE
  Synthetic Construct
TKYRTK

SEQ ID NO: 21032 - protein, 6 aa, ARTIFICIAL SEQUENCE
  Synthetic Construct
TKYRYK

SEQ ID NO: 21033 - protein, 6 aa, ARTIFICIAL SEQUENCE
  Synthetic Construct
TKYSAK

SEQ ID NO: 21034 - protein, 6 aa, ARTIFICIAL SEQUENCE
  Synthetic Construct
TKYSDK

SEQ ID NO: 21035 - protein, 6 aa, ARTIFICIAL SEQUENCE
  Synthetic Construct
TKYSEK

SEQ ID NO: 21036 - protein, 6 aa, ARTIFICIAL SEQUENCE
  Synthetic Construct
TKYSFK

SEQ ID NO: 21037 - protein, 6 aa, ARTIFICIAL SEQUENCE
  Synthetic Construct
TKYSGK

SEQ ID NO: 21038 - protein, 6 aa, ARTIFICIAL SEQUENCE
  Synthetic Construct
TKYSHK

SEQ ID NO: 21039 - protein, 6 aa, ARTIFICIAL SEQUENCE
  Synthetic Construct
TKYSIK

SEQ ID NO: 21040 - protein, 6 aa, ARTIFICIAL SEQUENCE
  Synthetic Construct
TKYSLK

SEQ ID NO: 21041 - protein, 6 aa, ARTIFICIAL SEQUENCE
  Synthetic Construct
TKYSNK

SEQ ID NO: 21042 - protein, 6 aa, ARTIFICIAL SEQUENCE
  Synthetic Construct
TKYSQK

SEQ ID NO: 21043 - protein, 6 aa, ARTIFICIAL SEQUENCE
  Synthetic Construct
TKYSRK

SEQ ID NO: 21044 - protein, 6 aa, ARTIFICIAL SEQUENCE
  Synthetic Construct
TKYSSK

SEQ ID NO: 21045 - protein, 6 aa, ARTIFICIAL SEQUENCE
  Synthetic Construct
TKYSTK

SEQ ID NO: 21046 - protein, 6 aa, ARTIFICIAL SEQUENCE
  Synthetic Construct
TKYSYK

SEQ ID NO: 21047 - protein, 6 aa, ARTIFICIAL SEQUENCE
  Synthetic Construct
TKYTAK

SEQ ID NO: 21048 - protein, 6 aa, ARTIFICIAL SEQUENCE
  Synthetic Construct
TKYTDK

SEQ ID NO: 21049 - protein, 6 aa, ARTIFICIAL SEQUENCE
  Synthetic Construct
TKYTEK

SEQ ID NO: 21050 - protein, 6 aa, ARTIFICIAL SEQUENCE
  Synthetic Construct
TKYTFK

SEQ ID NO: 21051 - protein, 6 aa, ARTIFICIAL SEQUENCE
  Synthetic Construct
TKYTGK

SEQ ID NO: 21052 - protein, 6 aa, ARTIFICIAL SEQUENCE
  Synthetic Construct
TKYTHK

SEQ ID NO: 21053 - protein, 6 aa, ARTIFICIAL SEQUENCE
  Synthetic Construct
TKYTIK

SEQ ID NO: 21054 - protein, 6 aa, ARTIFICIAL SEQUENCE
  Synthetic Construct
TKYTLK

SEQ ID NO: 21055 - protein, 6 aa, ARTIFICIAL SEQUENCE
  Synthetic Construct
TKYTNK

SEQ ID NO: 21056 - protein, 6 aa, ARTIFICIAL SEQUENCE
  Synthetic Construct
TKYTQK

SEQ ID NO: 21057 - protein, 6 aa, ARTIFICIAL SEQUENCE
  Synthetic Construct
TKYTRK

SEQ ID NO: 21058 - protein, 6 aa, ARTIFICIAL SEQUENCE
  Synthetic Construct
TKYTSK

SEQ ID NO: 21059 - protein, 6 aa, ARTIFICIAL SEQUENCE
  Synthetic Construct
TKYTTK

SEQ ID NO: 21060 - protein, 6 aa, ARTIFICIAL SEQUENCE
  Synthetic Construct
TKYTYK

SEQ ID NO: 21061 - protein, 6 aa, ARTIFICIAL SEQUENCE
  Synthetic Construct
TKYYAK

SEQ ID NO: 21062 - protein, 6 aa, ARTIFICIAL SEQUENCE
  Synthetic Construct
TKYYDK

SEQ ID NO: 21063 - protein, 6 aa, ARTIFICIAL SEQUENCE
  Synthetic Construct
TKYYEK

SEQ ID NO: 21064 - protein, 6 aa, ARTIFICIAL SEQUENCE
  Synthetic Construct
TKYYFK

SEQ ID NO: 21065 - protein, 6 aa, ARTIFICIAL SEQUENCE
  Synthetic Construct
TKYYGK

SEQ ID NO: 21066 - protein, 6 aa, ARTIFICIAL SEQUENCE
  Synthetic Construct
TKYYHK

SEQ ID NO: 21067 - protein, 6 aa, ARTIFICIAL SEQUENCE
  Synthetic Construct
TKYYIK

SEQ ID NO: 21068 - protein, 6 aa, ARTIFICIAL SEQUENCE
  Synthetic Construct
TKYYLK

SEQ ID NO: 21069 - protein, 6 aa, ARTIFICIAL SEQUENCE
  Synthetic Construct
TKYYNK

SEQ ID NO: 21070 - protein, 6 aa, ARTIFICIAL SEQUENCE
  Synthetic Construct
TKYYQK

SEQ ID NO: 21071 - protein, 6 aa, ARTIFICIAL SEQUENCE
  Synthetic Construct
TKYYRK

SEQ ID NO: 21072 - protein, 6 aa, ARTIFICIAL SEQUENCE
  Synthetic Construct
TKYYSK

SEQ ID NO: 21073 - protein, 6 aa, ARTIFICIAL SEQUENCE
  Synthetic Construct
TKYYTK

SEQ ID NO: 21074 - protein, 6 aa, ARTIFICIAL SEQUENCE
  Synthetic Construct
TKYYYK

SEQ ID NO: 21075 - protein, 6 aa, ARTIFICIAL SEQUENCE
  Synthetic Construct
KKAAAK

SEQ ID NO: 21076 - protein, 6 aa, ARTIFICIAL SEQUENCE
  Synthetic Construct
KKAADK

SEQ ID NO: 21077 - protein, 6 aa, ARTIFICIAL SEQUENCE
  Synthetic Construct
KKAAEK

SEQ ID NO: 21078 - protein, 6 aa, ARTIFICIAL SEQUENCE
  Synthetic Construct
KKAAFK

SEQ ID NO: 21079 - protein, 6 aa, ARTIFICIAL SEQUENCE
  Synthetic Construct
KKAAGK

SEQ ID NO: 21080 - protein, 6 aa, ARTIFICIAL SEQUENCE
  Synthetic Construct
KKAAHK

SEQ ID NO: 21081 - protein, 6 aa, ARTIFICIAL SEQUENCE
  Synthetic Construct
KKAAIK

SEQ ID NO: 21082 - protein, 6 aa, ARTIFICIAL SEQUENCE
  Synthetic Construct
KKAALK

SEQ ID NO: 21083 - protein, 6 aa, ARTIFICIAL SEQUENCE
  Synthetic Construct
KKAANK

SEQ ID NO: 21084 - protein, 6 aa, ARTIFICIAL SEQUENCE
  Synthetic Construct
KKAAQK

SEQ ID NO: 21085 - protein, 6 aa, ARTIFICIAL SEQUENCE
  Synthetic Construct
KKAARK

SEQ ID NO: 21086 - protein, 6 aa, ARTIFICIAL SEQUENCE
  Synthetic Construct
KKAASK

SEQ ID NO: 21087 - protein, 6 aa, ARTIFICIAL SEQUENCE
  Synthetic Construct
KKAATK

SEQ ID NO: 21088 - protein, 6 aa, ARTIFICIAL SEQUENCE
  Synthetic Construct
KKAAYK

SEQ ID NO: 21089 - protein, 6 aa, ARTIFICIAL SEQUENCE
  Synthetic Construct
KKADAK

SEQ ID NO: 21090 - protein, 6 aa, ARTIFICIAL SEQUENCE
  Synthetic Construct
KKADDK

SEQ ID NO: 21091 - protein, 6 aa, ARTIFICIAL SEQUENCE
  Synthetic Construct
KKADEK

SEQ ID NO: 21092 - protein, 6 aa, ARTIFICIAL SEQUENCE
  Synthetic Construct
KKADFK

SEQ ID NO: 21093 - protein, 6 aa, ARTIFICIAL SEQUENCE
  Synthetic Construct
KKADGK

SEQ ID NO: 21094 - protein, 6 aa, ARTIFICIAL SEQUENCE
  Synthetic Construct
KKADHK

SEQ ID NO: 21095 - protein, 6 aa, ARTIFICIAL SEQUENCE
  Synthetic Construct
KKADIK

SEQ ID NO: 21096 - protein, 6 aa, ARTIFICIAL SEQUENCE
  Synthetic Construct
KKADLK

SEQ ID NO: 21097 - protein, 6 aa, ARTIFICIAL SEQUENCE
  Synthetic Construct
KKADNK

SEQ ID NO: 21098 - protein, 6 aa, ARTIFICIAL SEQUENCE
  Synthetic Construct
KKADQK

SEQ ID NO: 21099 - protein, 6 aa, ARTIFICIAL SEQUENCE
  Synthetic Construct
KKADRK

SEQ ID NO: 21100 - protein, 6 aa, ARTIFICIAL SEQUENCE
  Synthetic Construct
KKADSK

SEQ ID NO: 21101 - protein, 6 aa, ARTIFICIAL SEQUENCE
  Synthetic Construct
KKADTK

SEQ ID NO: 21102 - protein, 6 aa, ARTIFICIAL SEQUENCE
  Synthetic Construct
KKADYK

SEQ ID NO: 21103 - protein, 6 aa, ARTIFICIAL SEQUENCE
  Synthetic Construct
KKAEAK

SEQ ID NO: 21104 - protein, 6 aa, ARTIFICIAL SEQUENCE
  Synthetic Construct
KKAEDK

SEQ ID NO: 21105 - protein, 6 aa, ARTIFICIAL SEQUENCE
  Synthetic Construct
KKAEEK

SEQ ID NO: 21106 - protein, 6 aa, ARTIFICIAL SEQUENCE
  Synthetic Construct
KKAEFK

SEQ ID NO: 21107 - protein, 6 aa, ARTIFICIAL SEQUENCE
  Synthetic Construct
KKAEGK

SEQ ID NO: 21108 - protein, 6 aa, ARTIFICIAL SEQUENCE
  Synthetic Construct
KKAEHK

SEQ ID NO: 21109 - protein, 6 aa, ARTIFICIAL SEQUENCE
  Synthetic Construct
KKAEIK

SEQ ID NO: 21110 - protein, 6 aa, ARTIFICIAL SEQUENCE
  Synthetic Construct
KKAELK

SEQ ID NO: 21111 - protein, 6 aa, ARTIFICIAL SEQUENCE
  Synthetic Construct
KKAENK

SEQ ID NO: 21112 - protein, 6 aa, ARTIFICIAL SEQUENCE
  Synthetic Construct
KKAEQK

SEQ ID NO: 21113 - protein, 6 aa, ARTIFICIAL SEQUENCE
  Synthetic Construct
KKAERK

SEQ ID NO: 21114 - protein, 6 aa, ARTIFICIAL SEQUENCE
  Synthetic Construct
KKAESK

SEQ ID NO: 21115 - protein, 6 aa, ARTIFICIAL SEQUENCE
  Synthetic Construct
KKAETK

SEQ ID NO: 21116 - protein, 6 aa, ARTIFICIAL SEQUENCE
  Synthetic Construct
KKAEYK

SEQ ID NO: 21117 - protein, 6 aa, ARTIFICIAL SEQUENCE
  Synthetic Construct
KKAFAK

SEQ ID NO: 21118 - protein, 6 aa, ARTIFICIAL SEQUENCE
  Synthetic Construct
KKAFDK

SEQ ID NO: 21119 - protein, 6 aa, ARTIFICIAL SEQUENCE
  Synthetic Construct
KKAFEK

SEQ ID NO: 21120 - protein, 6 aa, ARTIFICIAL SEQUENCE
  Synthetic Construct
KKAFFK

SEQ ID NO: 21121 - protein, 6 aa, ARTIFICIAL SEQUENCE
  Synthetic Construct
KKAFGK

SEQ ID NO: 21122 - protein, 6 aa, ARTIFICIAL SEQUENCE
  Synthetic Construct
KKAFHK

SEQ ID NO: 21123 - protein, 6 aa, ARTIFICIAL SEQUENCE
  Synthetic Construct
KKAFIK

SEQ ID NO: 21124 - protein, 6 aa, ARTIFICIAL SEQUENCE
  Synthetic Construct
KKAFLK

SEQ ID NO: 21125 - protein, 6 aa, ARTIFICIAL SEQUENCE
  Synthetic Construct
KKAFNK

SEQ ID NO: 21126 - protein, 6 aa, ARTIFICIAL SEQUENCE
  Synthetic Construct
KKAFQK

SEQ ID NO: 21127 - protein, 6 aa, ARTIFICIAL SEQUENCE
  Synthetic Construct
KKAFRK

SEQ ID NO: 21128 - protein, 6 aa, ARTIFICIAL SEQUENCE
  Synthetic Construct
KKAFSK

SEQ ID NO: 21129 - protein, 6 aa, ARTIFICIAL SEQUENCE
  Synthetic Construct
KKAFTK

SEQ ID NO: 21130 - protein, 6 aa, ARTIFICIAL SEQUENCE
  Synthetic Construct
KKAFYK

SEQ ID NO: 21131 - protein, 6 aa, ARTIFICIAL SEQUENCE
  Synthetic Construct
KKAGAK

SEQ ID NO: 21132 - protein, 6 aa, ARTIFICIAL SEQUENCE
  Synthetic Construct
KKAGDK

SEQ ID NO: 21133 - protein, 6 aa, ARTIFICIAL SEQUENCE
  Synthetic Construct
KKAGEK

SEQ ID NO: 21134 - protein, 6 aa, ARTIFICIAL SEQUENCE
  Synthetic Construct
KKAGFK

SEQ ID NO: 21135 - protein, 6 aa, ARTIFICIAL SEQUENCE
  Synthetic Construct
KKAGGK

SEQ ID NO: 21136 - protein, 6 aa, ARTIFICIAL SEQUENCE
  Synthetic Construct
KKAGHK

SEQ ID NO: 21137 - protein, 6 aa, ARTIFICIAL SEQUENCE
  Synthetic Construct
KKAGIK

SEQ ID NO: 21138 - protein, 6 aa, ARTIFICIAL SEQUENCE
  Synthetic Construct
KKAGLK

SEQ ID NO: 21139 - protein, 6 aa, ARTIFICIAL SEQUENCE
  Synthetic Construct
KKAGNK

SEQ ID NO: 21140 - protein, 6 aa, ARTIFICIAL SEQUENCE
  Synthetic Construct
KKAGQK

SEQ ID NO: 21141 - protein, 6 aa, ARTIFICIAL SEQUENCE
  Synthetic Construct
KKAGRK

SEQ ID NO: 21142 - protein, 6 aa, ARTIFICIAL SEQUENCE
  Synthetic Construct
KKAGSK

SEQ ID NO: 21143 - protein, 6 aa, ARTIFICIAL SEQUENCE
  Synthetic Construct
KKAGTK

SEQ ID NO: 21144 - protein, 6 aa, ARTIFICIAL SEQUENCE
  Synthetic Construct
KKAGYK

SEQ ID NO: 21145 - protein, 6 aa, ARTIFICIAL SEQUENCE
  Synthetic Construct
KKAHAK

SEQ ID NO: 21146 - protein, 6 aa, ARTIFICIAL SEQUENCE
  Synthetic Construct
KKAHDK

SEQ ID NO: 21147 - protein, 6 aa, ARTIFICIAL SEQUENCE
  Synthetic Construct
KKAHEK

SEQ ID NO: 21148 - protein, 6 aa, ARTIFICIAL SEQUENCE
  Synthetic Construct
KKAHFK

SEQ ID NO: 21149 - protein, 6 aa, ARTIFICIAL SEQUENCE
  Synthetic Construct
KKAHGK

SEQ ID NO: 21150 - protein, 6 aa, ARTIFICIAL SEQUENCE
  Synthetic Construct
KKAHHK

SEQ ID NO: 21151 - protein, 6 aa, ARTIFICIAL SEQUENCE
  Synthetic Construct
KKAHIK

SEQ ID NO: 21152 - protein, 6 aa, ARTIFICIAL SEQUENCE
  Synthetic Construct
KKAHLK

SEQ ID NO: 21153 - protein, 6 aa, ARTIFICIAL SEQUENCE
  Synthetic Construct
KKAHNK

SEQ ID NO: 21154 - protein, 6 aa, ARTIFICIAL SEQUENCE
  Synthetic Construct
KKAHQK

SEQ ID NO: 21155 - protein, 6 aa, ARTIFICIAL SEQUENCE
  Synthetic Construct
KKAHRK

SEQ ID NO: 21156 - protein, 6 aa, ARTIFICIAL SEQUENCE
  Synthetic Construct
KKAHSK

SEQ ID NO: 21157 - protein, 6 aa, ARTIFICIAL SEQUENCE
  Synthetic Construct
KKAHTK

SEQ ID NO: 21158 - protein, 6 aa, ARTIFICIAL SEQUENCE
  Synthetic Construct
KKAHYK

SEQ ID NO: 21159 - protein, 6 aa, ARTIFICIAL SEQUENCE
  Synthetic Construct
KKAIAK

SEQ ID NO: 21160 - protein, 6 aa, ARTIFICIAL SEQUENCE
  Synthetic Construct
KKAIDK

SEQ ID NO: 21161 - protein, 6 aa, ARTIFICIAL SEQUENCE
  Synthetic Construct
KKAIEK

SEQ ID NO: 21162 - protein, 6 aa, ARTIFICIAL SEQUENCE
  Synthetic Construct
KKAIFK

SEQ ID NO: 21163 - protein, 6 aa, ARTIFICIAL SEQUENCE
  Synthetic Construct
KKAIGK

SEQ ID NO: 21164 - protein, 6 aa, ARTIFICIAL SEQUENCE
  Synthetic Construct
KKAIHK

SEQ ID NO: 21165 - protein, 6 aa, ARTIFICIAL SEQUENCE
  Synthetic Construct
KKAIIK

SEQ ID NO: 21166 - protein, 6 aa, ARTIFICIAL SEQUENCE
  Synthetic Construct
KKAILK

SEQ ID NO: 21167 - protein, 6 aa, ARTIFICIAL SEQUENCE
  Synthetic Construct
KKAINK

SEQ ID NO: 21168 - protein, 6 aa, ARTIFICIAL SEQUENCE
  Synthetic Construct
KKAIQK

SEQ ID NO: 21169 - protein, 6 aa, ARTIFICIAL SEQUENCE
  Synthetic Construct
KKAIRK

SEQ ID NO: 21170 - protein, 6 aa, ARTIFICIAL SEQUENCE
  Synthetic Construct
KKAISK

SEQ ID NO: 21171 - protein, 6 aa, ARTIFICIAL SEQUENCE
  Synthetic Construct
KKAITK

SEQ ID NO: 21172 - protein, 6 aa, ARTIFICIAL SEQUENCE
  Synthetic Construct
KKAIYK

SEQ ID NO: 21173 - protein, 6 aa, ARTIFICIAL SEQUENCE
  Synthetic Construct
KKALAK

SEQ ID NO: 21174 - protein, 6 aa, ARTIFICIAL SEQUENCE
  Synthetic Construct
KKALDK

SEQ ID NO: 21175 - protein, 6 aa, ARTIFICIAL SEQUENCE
  Synthetic Construct
KKALEK

SEQ ID NO: 21176 - protein, 6 aa, ARTIFICIAL SEQUENCE
  Synthetic Construct
KKALFK

SEQ ID NO: 21177 - protein, 6 aa, ARTIFICIAL SEQUENCE
  Synthetic Construct
KKALGK

SEQ ID NO: 21178 - protein, 6 aa, ARTIFICIAL SEQUENCE
  Synthetic Construct
KKALHK

SEQ ID NO: 21179 - protein, 6 aa, ARTIFICIAL SEQUENCE
  Synthetic Construct
KKALIK

SEQ ID NO: 21180 - protein, 6 aa, ARTIFICIAL SEQUENCE
  Synthetic Construct
KKALLK

SEQ ID NO: 21181 - protein, 6 aa, ARTIFICIAL SEQUENCE
  Synthetic Construct
KKALNK

SEQ ID NO: 21182 - protein, 6 aa, ARTIFICIAL SEQUENCE
  Synthetic Construct
KKALQK

SEQ ID NO: 21183 - protein, 6 aa, ARTIFICIAL SEQUENCE
  Synthetic Construct
KKALRK

SEQ ID NO: 21184 - protein, 6 aa, ARTIFICIAL SEQUENCE
  Synthetic Construct
KKALSK

SEQ ID NO: 21185 - protein, 6 aa, ARTIFICIAL SEQUENCE
  Synthetic Construct
KKALTK

SEQ ID NO: 21186 - protein, 6 aa, ARTIFICIAL SEQUENCE
  Synthetic Construct
KKALYK

SEQ ID NO: 21187 - protein, 6 aa, ARTIFICIAL SEQUENCE
  Synthetic Construct
KKANAK

SEQ ID NO: 21188 - protein, 6 aa, ARTIFICIAL SEQUENCE
  Synthetic Construct
KKANDK

SEQ ID NO: 21189 - protein, 6 aa, ARTIFICIAL SEQUENCE
  Synthetic Construct
KKANEK

SEQ ID NO: 21190 - protein, 6 aa, ARTIFICIAL SEQUENCE
  Synthetic Construct
KKANFK

SEQ ID NO: 21191 - protein, 6 aa, ARTIFICIAL SEQUENCE
  Synthetic Construct
KKANGK

SEQ ID NO: 21192 - protein, 6 aa, ARTIFICIAL SEQUENCE
  Synthetic Construct
KKANHK

SEQ ID NO: 21193 - protein, 6 aa, ARTIFICIAL SEQUENCE
  Synthetic Construct
KKANIK

SEQ ID NO: 21194 - protein, 6 aa, ARTIFICIAL SEQUENCE
  Synthetic Construct
KKANLK

SEQ ID NO: 21195 - protein, 6 aa, ARTIFICIAL SEQUENCE
  Synthetic Construct
KKANNK

SEQ ID NO: 21196 - protein, 6 aa, ARTIFICIAL SEQUENCE
  Synthetic Construct
KKANQK

SEQ ID NO: 21197 - protein, 6 aa, ARTIFICIAL SEQUENCE
  Synthetic Construct
KKANRK

SEQ ID NO: 21198 - protein, 6 aa, ARTIFICIAL SEQUENCE
  Synthetic Construct
KKANSK

SEQ ID NO: 21199 - protein, 6 aa, ARTIFICIAL SEQUENCE
  Synthetic Construct
KKANTK

SEQ ID NO: 21200 - protein, 6 aa, ARTIFICIAL SEQUENCE
  Synthetic Construct
KKANYK

SEQ ID NO: 21201 - protein, 6 aa, ARTIFICIAL SEQUENCE
  Synthetic Construct
KKAQAK

SEQ ID NO: 21202 - protein, 6 aa, ARTIFICIAL SEQUENCE
  Synthetic Construct
KKAQDK

SEQ ID NO: 21203 - protein, 6 aa, ARTIFICIAL SEQUENCE
  Synthetic Construct
KKAQEK

SEQ ID NO: 21204 - protein, 6 aa, ARTIFICIAL SEQUENCE
  Synthetic Construct
KKAQFK

SEQ ID NO: 21205 - protein, 6 aa, ARTIFICIAL SEQUENCE
  Synthetic Construct
KKAQGK

SEQ ID NO: 21206 - protein, 6 aa, ARTIFICIAL SEQUENCE
  Synthetic Construct
KKAQHK

SEQ ID NO: 21207 - protein, 6 aa, ARTIFICIAL SEQUENCE
  Synthetic Construct
KKAQIK

SEQ ID NO: 21208 - protein, 6 aa, ARTIFICIAL SEQUENCE
  Synthetic Construct
KKAQLK

SEQ ID NO: 21209 - protein, 6 aa, ARTIFICIAL SEQUENCE
  Synthetic Construct
KKAQNK

SEQ ID NO: 21210 - protein, 6 aa, ARTIFICIAL SEQUENCE
  Synthetic Construct
KKAQQK

SEQ ID NO: 21211 - protein, 6 aa, ARTIFICIAL SEQUENCE
  Synthetic Construct
KKAQRK

SEQ ID NO: 21212 - protein, 6 aa, ARTIFICIAL SEQUENCE
  Synthetic Construct
KKAQSK

SEQ ID NO: 21213 - protein, 6 aa, ARTIFICIAL SEQUENCE
  Synthetic Construct
KKAQTK

SEQ ID NO: 21214 - protein, 6 aa, ARTIFICIAL SEQUENCE
  Synthetic Construct
KKAQYK

SEQ ID NO: 21215 - protein, 6 aa, ARTIFICIAL SEQUENCE
  Synthetic Construct
KKARAK

SEQ ID NO: 21216 - protein, 6 aa, ARTIFICIAL SEQUENCE
  Synthetic Construct
KKARDK

SEQ ID NO: 21217 - protein, 6 aa, ARTIFICIAL SEQUENCE
  Synthetic Construct
KKAREK

SEQ ID NO: 21218 - protein, 6 aa, ARTIFICIAL SEQUENCE
  Synthetic Construct
KKARFK

SEQ ID NO: 21219 - protein, 6 aa, ARTIFICIAL SEQUENCE
  Synthetic Construct
KKARGK

SEQ ID NO: 21220 - protein, 6 aa, ARTIFICIAL SEQUENCE
  Synthetic Construct
KKARHK

SEQ ID NO: 21221 - protein, 6 aa, ARTIFICIAL SEQUENCE
  Synthetic Construct
KKARIK

SEQ ID NO: 21222 - protein, 6 aa, ARTIFICIAL SEQUENCE
  Synthetic Construct
KKARLK

SEQ ID NO: 21223 - protein, 6 aa, ARTIFICIAL SEQUENCE
  Synthetic Construct
KKARNK

SEQ ID NO: 21224 - protein, 6 aa, ARTIFICIAL SEQUENCE
  Synthetic Construct
KKARQK

SEQ ID NO: 21225 - protein, 6 aa, ARTIFICIAL SEQUENCE
  Synthetic Construct
KKARRK

SEQ ID NO: 21226 - protein, 6 aa, ARTIFICIAL SEQUENCE
  Synthetic Construct
KKARSK

SEQ ID NO: 21227 - protein, 6 aa, ARTIFICIAL SEQUENCE
  Synthetic Construct
KKARTK

SEQ ID NO: 21228 - protein, 6 aa, ARTIFICIAL SEQUENCE
  Synthetic Construct
KKARYK

SEQ ID NO: 21229 - protein, 6 aa, ARTIFICIAL SEQUENCE
  Synthetic Construct
KKASAK

SEQ ID NO: 21230 - protein, 6 aa, ARTIFICIAL SEQUENCE
  Synthetic Construct
KKASDK

SEQ ID NO: 21231 - protein, 6 aa, ARTIFICIAL SEQUENCE
  Synthetic Construct
KKASEK

SEQ ID NO: 21232 - protein, 6 aa, ARTIFICIAL SEQUENCE
  Synthetic Construct
KKASFK

SEQ ID NO: 21233 - protein, 6 aa, ARTIFICIAL SEQUENCE
  Synthetic Construct
KKASGK

SEQ ID NO: 21234 - protein, 6 aa, ARTIFICIAL SEQUENCE
  Synthetic Construct
KKASHK

SEQ ID NO: 21235 - protein, 6 aa, ARTIFICIAL SEQUENCE
  Synthetic Construct
KKASIK

SEQ ID NO: 21236 - protein, 6 aa, ARTIFICIAL SEQUENCE
  Synthetic Construct
KKASLK

SEQ ID NO: 21237 - protein, 6 aa, ARTIFICIAL SEQUENCE
  Synthetic Construct
KKASNK

SEQ ID NO: 21238 - protein, 6 aa, ARTIFICIAL SEQUENCE
  Synthetic Construct
KKASQK

SEQ ID NO: 21239 - protein, 6 aa, ARTIFICIAL SEQUENCE
  Synthetic Construct
KKASRK

SEQ ID NO: 21240 - protein, 6 aa, ARTIFICIAL SEQUENCE
  Synthetic Construct
KKASSK

SEQ ID NO: 21241 - protein, 6 aa, ARTIFICIAL SEQUENCE
  Synthetic Construct
KKASTK

SEQ ID NO: 21242 - protein, 6 aa, ARTIFICIAL SEQUENCE
  Synthetic Construct
KKASYK

SEQ ID NO: 21243 - protein, 6 aa, ARTIFICIAL SEQUENCE
  Synthetic Construct
KKATAK

SEQ ID NO: 21244 - protein, 6 aa, ARTIFICIAL SEQUENCE
  Synthetic Construct
KKATDK

SEQ ID NO: 21245 - protein, 6 aa, ARTIFICIAL SEQUENCE
  Synthetic Construct
KKATEK

SEQ ID NO: 21246 - protein, 6 aa, ARTIFICIAL SEQUENCE
  Synthetic Construct
KKATFK

SEQ ID NO: 21247 - protein, 6 aa, ARTIFICIAL SEQUENCE
  Synthetic Construct
KKATGK

SEQ ID NO: 21248 - protein, 6 aa, ARTIFICIAL SEQUENCE
  Synthetic Construct
KKATHK

SEQ ID NO: 21249 - protein, 6 aa, ARTIFICIAL SEQUENCE
  Synthetic Construct
KKATIK

SEQ ID NO: 21250 - protein, 6 aa, ARTIFICIAL SEQUENCE
  Synthetic Construct
KKATLK

SEQ ID NO: 21251 - protein, 6 aa, ARTIFICIAL SEQUENCE
  Synthetic Construct
KKATNK

SEQ ID NO: 21252 - protein, 6 aa, ARTIFICIAL SEQUENCE
  Synthetic Construct
KKATQK

SEQ ID NO: 21253 - protein, 6 aa, ARTIFICIAL SEQUENCE
  Synthetic Construct
KKATRK

SEQ ID NO: 21254 - protein, 6 aa, ARTIFICIAL SEQUENCE
  Synthetic Construct
KKATSK

SEQ ID NO: 21255 - protein, 6 aa, ARTIFICIAL SEQUENCE
  Synthetic Construct
KKATTK

SEQ ID NO: 21256 - protein, 6 aa, ARTIFICIAL SEQUENCE
  Synthetic Construct
KKATYK

SEQ ID NO: 21257 - protein, 6 aa, ARTIFICIAL SEQUENCE
  Synthetic Construct
KKAYAK

SEQ ID NO: 21258 - protein, 6 aa, ARTIFICIAL SEQUENCE
  Synthetic Construct
KKAYDK

SEQ ID NO: 21259 - protein, 6 aa, ARTIFICIAL SEQUENCE
  Synthetic Construct
KKAYEK

SEQ ID NO: 21260 - protein, 6 aa, ARTIFICIAL SEQUENCE
  Synthetic Construct
KKAYFK

SEQ ID NO: 21261 - protein, 6 aa, ARTIFICIAL SEQUENCE
  Synthetic Construct
KKAYGK

SEQ ID NO: 21262 - protein, 6 aa, ARTIFICIAL SEQUENCE
  Synthetic Construct
KKAYHK

SEQ ID NO: 21263 - protein, 6 aa, ARTIFICIAL SEQUENCE
  Synthetic Construct
KKAYIK

SEQ ID NO: 21264 - protein, 6 aa, ARTIFICIAL SEQUENCE
  Synthetic Construct
KKAYLK

SEQ ID NO: 21265 - protein, 6 aa, ARTIFICIAL SEQUENCE
  Synthetic Construct
KKAYNK

SEQ ID NO: 21266 - protein, 6 aa, ARTIFICIAL SEQUENCE
  Synthetic Construct
KKAYQK

SEQ ID NO: 21267 - protein, 6 aa, ARTIFICIAL SEQUENCE
  Synthetic Construct
KKAYRK

SEQ ID NO: 21268 - protein, 6 aa, ARTIFICIAL SEQUENCE
  Synthetic Construct
KKAYSK

SEQ ID NO: 21269 - protein, 6 aa, ARTIFICIAL SEQUENCE
  Synthetic Construct
KKAYTK

SEQ ID NO: 21270 - protein, 6 aa, ARTIFICIAL SEQUENCE
  Synthetic Construct
KKAYYK

SEQ ID NO: 21271 - protein, 6 aa, ARTIFICIAL SEQUENCE
  Synthetic Construct
KKDAAK

SEQ ID NO: 21272 - protein, 6 aa, ARTIFICIAL SEQUENCE
  Synthetic Construct
KKDADK

SEQ ID NO: 21273 - protein, 6 aa, ARTIFICIAL SEQUENCE
  Synthetic Construct
KKDAEK

SEQ ID NO: 21274 - protein, 6 aa, ARTIFICIAL SEQUENCE
  Synthetic Construct
KKDAFK

SEQ ID NO: 21275 - protein, 6 aa, ARTIFICIAL SEQUENCE
  Synthetic Construct
KKDAGK

SEQ ID NO: 21276 - protein, 6 aa, ARTIFICIAL SEQUENCE
  Synthetic Construct
KKDAHK

SEQ ID NO: 21277 - protein, 6 aa, ARTIFICIAL SEQUENCE
  Synthetic Construct
KKDAIK

SEQ ID NO: 21278 - protein, 6 aa, ARTIFICIAL SEQUENCE
  Synthetic Construct
KKDALK

SEQ ID NO: 21279 - protein, 6 aa, ARTIFICIAL SEQUENCE
  Synthetic Construct
KKDANK

SEQ ID NO: 21280 - protein, 6 aa, ARTIFICIAL SEQUENCE
  Synthetic Construct
KKDAQK

SEQ ID NO: 21281 - protein, 6 aa, ARTIFICIAL SEQUENCE
  Synthetic Construct
KKDARK

SEQ ID NO: 21282 - protein, 6 aa, ARTIFICIAL SEQUENCE
  Synthetic Construct
KKDASK

SEQ ID NO: 21283 - protein, 6 aa, ARTIFICIAL SEQUENCE
  Synthetic Construct
KKDATK

SEQ ID NO: 21284 - protein, 6 aa, ARTIFICIAL SEQUENCE
  Synthetic Construct
KKDAYK

SEQ ID NO: 21285 - protein, 6 aa, ARTIFICIAL SEQUENCE
  Synthetic Construct
KKDDAK

SEQ ID NO: 21286 - protein, 6 aa, ARTIFICIAL SEQUENCE
  Synthetic Construct
KKDDDK

SEQ ID NO: 21287 - protein, 6 aa, ARTIFICIAL SEQUENCE
  Synthetic Construct
KKDDEK

SEQ ID NO: 21288 - protein, 6 aa, ARTIFICIAL SEQUENCE
  Synthetic Construct
KKDDFK

SEQ ID NO: 21289 - protein, 6 aa, ARTIFICIAL SEQUENCE
  Synthetic Construct
KKDDGK

SEQ ID NO: 21290 - protein, 6 aa, ARTIFICIAL SEQUENCE
  Synthetic Construct
KKDDHK

SEQ ID NO: 21291 - protein, 6 aa, ARTIFICIAL SEQUENCE
  Synthetic Construct
KKDDIK

SEQ ID NO: 21292 - protein, 6 aa, ARTIFICIAL SEQUENCE
  Synthetic Construct
KKDDLK

SEQ ID NO: 21293 - protein, 6 aa, ARTIFICIAL SEQUENCE
  Synthetic Construct
KKDDNK

SEQ ID NO: 21294 - protein, 6 aa, ARTIFICIAL SEQUENCE
  Synthetic Construct
KKDDQK

SEQ ID NO: 21295 - protein, 6 aa, ARTIFICIAL SEQUENCE
  Synthetic Construct
KKDDRK

SEQ ID NO: 21296 - protein, 6 aa, ARTIFICIAL SEQUENCE
  Synthetic Construct
KKDDSK

SEQ ID NO: 21297 - protein, 6 aa, ARTIFICIAL SEQUENCE
  Synthetic Construct
KKDDTK

SEQ ID NO: 21298 - protein, 6 aa, ARTIFICIAL SEQUENCE
  Synthetic Construct
KKDDYK

SEQ ID NO: 21299 - protein, 6 aa, ARTIFICIAL SEQUENCE
  Synthetic Construct
KKDEAK

SEQ ID NO: 21300 - protein, 6 aa, ARTIFICIAL SEQUENCE
  Synthetic Construct
KKDEDK

SEQ ID NO: 21301 - protein, 6 aa, ARTIFICIAL SEQUENCE
  Synthetic Construct
KKDEEK

SEQ ID NO: 21302 - protein, 6 aa, ARTIFICIAL SEQUENCE
  Synthetic Construct
KKDEFK

SEQ ID NO: 21303 - protein, 6 aa, ARTIFICIAL SEQUENCE
  Synthetic Construct
KKDEGK

SEQ ID NO: 21304 - protein, 6 aa, ARTIFICIAL SEQUENCE
  Synthetic Construct
KKDEHK

SEQ ID NO: 21305 - protein, 6 aa, ARTIFICIAL SEQUENCE
  Synthetic Construct
KKDEIK

SEQ ID NO: 21306 - protein, 6 aa, ARTIFICIAL SEQUENCE
  Synthetic Construct
KKDELK

SEQ ID NO: 21307 - protein, 6 aa, ARTIFICIAL SEQUENCE
  Synthetic Construct
KKDENK

SEQ ID NO: 21308 - protein, 6 aa, ARTIFICIAL SEQUENCE
  Synthetic Construct
KKDEQK

SEQ ID NO: 21309 - protein, 6 aa, ARTIFICIAL SEQUENCE
  Synthetic Construct
KKDERK

SEQ ID NO: 21310 - protein, 6 aa, ARTIFICIAL SEQUENCE
  Synthetic Construct
KKDESK

SEQ ID NO: 21311 - protein, 6 aa, ARTIFICIAL SEQUENCE
  Synthetic Construct
KKDETK

SEQ ID NO: 21312 - protein, 6 aa, ARTIFICIAL SEQUENCE
  Synthetic Construct
KKDEYK

SEQ ID NO: 21313 - protein, 6 aa, ARTIFICIAL SEQUENCE
  Synthetic Construct
KKDFAK

SEQ ID NO: 21314 - protein, 6 aa, ARTIFICIAL SEQUENCE
  Synthetic Construct
KKDFDK

SEQ ID NO: 21315 - protein, 6 aa, ARTIFICIAL SEQUENCE
  Synthetic Construct
KKDFEK

SEQ ID NO: 21316 - protein, 6 aa, ARTIFICIAL SEQUENCE
  Synthetic Construct
KKDFFK

SEQ ID NO: 21317 - protein, 6 aa, ARTIFICIAL SEQUENCE
  Synthetic Construct
KKDFGK

SEQ ID NO: 21318 - protein, 6 aa, ARTIFICIAL SEQUENCE
  Synthetic Construct
KKDFHK

SEQ ID NO: 21319 - protein, 6 aa, ARTIFICIAL SEQUENCE
  Synthetic Construct
KKDFIK

SEQ ID NO: 21320 - protein, 6 aa, ARTIFICIAL SEQUENCE
  Synthetic Construct
KKDFLK

SEQ ID NO: 21321 - protein, 6 aa, ARTIFICIAL SEQUENCE
  Synthetic Construct
KKDFNK

SEQ ID NO: 21322 - protein, 6 aa, ARTIFICIAL SEQUENCE
  Synthetic Construct
KKDFQK

SEQ ID NO: 21323 - protein, 6 aa, ARTIFICIAL SEQUENCE
  Synthetic Construct
KKDFRK

SEQ ID NO: 21324 - protein, 6 aa, ARTIFICIAL SEQUENCE
  Synthetic Construct
KKDFSK

SEQ ID NO: 21325 - protein, 6 aa, ARTIFICIAL SEQUENCE
  Synthetic Construct
KKDFTK

SEQ ID NO: 21326 - protein, 6 aa, ARTIFICIAL SEQUENCE
  Synthetic Construct
KKDFYK

SEQ ID NO: 21327 - protein, 6 aa, ARTIFICIAL SEQUENCE
  Synthetic Construct
KKDGAK

SEQ ID NO: 21328 - protein, 6 aa, ARTIFICIAL SEQUENCE
  Synthetic Construct
KKDGDK

SEQ ID NO: 21329 - protein, 6 aa, ARTIFICIAL SEQUENCE
  Synthetic Construct
KKDGEK

SEQ ID NO: 21330 - protein, 6 aa, ARTIFICIAL SEQUENCE
  Synthetic Construct
KKDGFK

SEQ ID NO: 21331 - protein, 6 aa, ARTIFICIAL SEQUENCE
  Synthetic Construct
KKDGGK

SEQ ID NO: 21332 - protein, 6 aa, ARTIFICIAL SEQUENCE
  Synthetic Construct
KKDGHK

SEQ ID NO: 21333 - protein, 6 aa, ARTIFICIAL SEQUENCE
  Synthetic Construct
KKDGIK

SEQ ID NO: 21334 - protein, 6 aa, ARTIFICIAL SEQUENCE
  Synthetic Construct
KKDGLK

SEQ ID NO: 21335 - protein, 6 aa, ARTIFICIAL SEQUENCE
  Synthetic Construct
KKDGNK

SEQ ID NO: 21336 - protein, 6 aa, ARTIFICIAL SEQUENCE
  Synthetic Construct
KKDGQK

SEQ ID NO: 21337 - protein, 6 aa, ARTIFICIAL SEQUENCE
  Synthetic Construct
KKDGRK

SEQ ID NO: 21338 - protein, 6 aa, ARTIFICIAL SEQUENCE
  Synthetic Construct
KKDGSK

SEQ ID NO: 21339 - protein, 6 aa, ARTIFICIAL SEQUENCE
  Synthetic Construct
KKDGTK

SEQ ID NO: 21340 - protein, 6 aa, ARTIFICIAL SEQUENCE
  Synthetic Construct
KKDGYK

SEQ ID NO: 21341 - protein, 6 aa, ARTIFICIAL SEQUENCE
  Synthetic Construct
KKDHAK

SEQ ID NO: 21342 - protein, 6 aa, ARTIFICIAL SEQUENCE
  Synthetic Construct
KKDHDK

SEQ ID NO: 21343 - protein, 6 aa, ARTIFICIAL SEQUENCE
  Synthetic Construct
KKDHEK

SEQ ID NO: 21344 - protein, 6 aa, ARTIFICIAL SEQUENCE
  Synthetic Construct
KKDHFK

SEQ ID NO: 21345 - protein, 6 aa, ARTIFICIAL SEQUENCE
  Synthetic Construct
KKDHGK

SEQ ID NO: 21346 - protein, 6 aa, ARTIFICIAL SEQUENCE
  Synthetic Construct
KKDHHK

SEQ ID NO: 21347 - protein, 6 aa, ARTIFICIAL SEQUENCE
  Synthetic Construct
KKDHIK

SEQ ID NO: 21348 - protein, 6 aa, ARTIFICIAL SEQUENCE
  Synthetic Construct
KKDHLK

SEQ ID NO: 21349 - protein, 6 aa, ARTIFICIAL SEQUENCE
  Synthetic Construct
KKDHNK

SEQ ID NO: 21350 - protein, 6 aa, ARTIFICIAL SEQUENCE
  Synthetic Construct
KKDHQK

SEQ ID NO: 21351 - protein, 6 aa, ARTIFICIAL SEQUENCE
  Synthetic Construct
KKDHRK

SEQ ID NO: 21352 - protein, 6 aa, ARTIFICIAL SEQUENCE
  Synthetic Construct
KKDHSK

SEQ ID NO: 21353 - protein, 6 aa, ARTIFICIAL SEQUENCE
  Synthetic Construct
KKDHTK

SEQ ID NO: 21354 - protein, 6 aa, ARTIFICIAL SEQUENCE
  Synthetic Construct
KKDHYK

SEQ ID NO: 21355 - protein, 6 aa, ARTIFICIAL SEQUENCE
  Synthetic Construct
KKDIAK

SEQ ID NO: 21356 - protein, 6 aa, ARTIFICIAL SEQUENCE
  Synthetic Construct
KKDIDK

SEQ ID NO: 21357 - protein, 6 aa, ARTIFICIAL SEQUENCE
  Synthetic Construct
KKDIEK

SEQ ID NO: 21358 - protein, 6 aa, ARTIFICIAL SEQUENCE
  Synthetic Construct
KKDIFK

SEQ ID NO: 21359 - protein, 6 aa, ARTIFICIAL SEQUENCE
  Synthetic Construct
KKDIGK

SEQ ID NO: 21360 - protein, 6 aa, ARTIFICIAL SEQUENCE
  Synthetic Construct
KKDIHK

SEQ ID NO: 21361 - protein, 6 aa, ARTIFICIAL SEQUENCE
  Synthetic Construct
KKDIIK

SEQ ID NO: 21362 - protein, 6 aa, ARTIFICIAL SEQUENCE
  Synthetic Construct
KKDILK

SEQ ID NO: 21363 - protein, 6 aa, ARTIFICIAL SEQUENCE
  Synthetic Construct
KKDINK

SEQ ID NO: 21364 - protein, 6 aa, ARTIFICIAL SEQUENCE
  Synthetic Construct
KKDIQK

SEQ ID NO: 21365 - protein, 6 aa, ARTIFICIAL SEQUENCE
  Synthetic Construct
KKDIRK

SEQ ID NO: 21366 - protein, 6 aa, ARTIFICIAL SEQUENCE
  Synthetic Construct
KKDISK

SEQ ID NO: 21367 - protein, 6 aa, ARTIFICIAL SEQUENCE
  Synthetic Construct
KKDITK

SEQ ID NO: 21368 - protein, 6 aa, ARTIFICIAL SEQUENCE
  Synthetic Construct
KKDIYK

SEQ ID NO: 21369 - protein, 6 aa, ARTIFICIAL SEQUENCE
  Synthetic Construct
KKDLAK

SEQ ID NO: 21370 - protein, 6 aa, ARTIFICIAL SEQUENCE
  Synthetic Construct
KKDLDK

SEQ ID NO: 21371 - protein, 6 aa, ARTIFICIAL SEQUENCE
  Synthetic Construct
KKDLEK

SEQ ID NO: 21372 - protein, 6 aa, ARTIFICIAL SEQUENCE
  Synthetic Construct
KKDLFK

SEQ ID NO: 21373 - protein, 6 aa, ARTIFICIAL SEQUENCE
  Synthetic Construct
KKDLGK

SEQ ID NO: 21374 - protein, 6 aa, ARTIFICIAL SEQUENCE
  Synthetic Construct
KKDLHK

SEQ ID NO: 21375 - protein, 6 aa, ARTIFICIAL SEQUENCE
  Synthetic Construct
KKDLIK

SEQ ID NO: 21376 - protein, 6 aa, ARTIFICIAL SEQUENCE
  Synthetic Construct
KKDLLK

SEQ ID NO: 21377 - protein, 6 aa, ARTIFICIAL SEQUENCE
  Synthetic Construct
KKDLNK

SEQ ID NO: 21378 - protein, 6 aa, ARTIFICIAL SEQUENCE
  Synthetic Construct
KKDLQK

SEQ ID NO: 21379 - protein, 6 aa, ARTIFICIAL SEQUENCE
  Synthetic Construct
KKDLRK

SEQ ID NO: 21380 - protein, 6 aa, ARTIFICIAL SEQUENCE
  Synthetic Construct
KKDLSK

SEQ ID NO: 21381 - protein, 6 aa, ARTIFICIAL SEQUENCE
  Synthetic Construct
KKDLTK

SEQ ID NO: 21382 - protein, 6 aa, ARTIFICIAL SEQUENCE
  Synthetic Construct
KKDLYK

SEQ ID NO: 21383 - protein, 6 aa, ARTIFICIAL SEQUENCE
  Synthetic Construct
KKDNAK

SEQ ID NO: 21384 - protein, 6 aa, ARTIFICIAL SEQUENCE
  Synthetic Construct
KKDNDK

SEQ ID NO: 21385 - protein, 6 aa, ARTIFICIAL SEQUENCE
  Synthetic Construct
KKDNEK

SEQ ID NO: 21386 - protein, 6 aa, ARTIFICIAL SEQUENCE
  Synthetic Construct
KKDNFK

SEQ ID NO: 21387 - protein, 6 aa, ARTIFICIAL SEQUENCE
  Synthetic Construct
KKDNGK

SEQ ID NO: 21388 - protein, 6 aa, ARTIFICIAL SEQUENCE
  Synthetic Construct
KKDNHK

SEQ ID NO: 21389 - protein, 6 aa, ARTIFICIAL SEQUENCE
  Synthetic Construct
KKDNIK

SEQ ID NO: 21390 - protein, 6 aa, ARTIFICIAL SEQUENCE
  Synthetic Construct
KKDNLK

SEQ ID NO: 21391 - protein, 6 aa, ARTIFICIAL SEQUENCE
  Synthetic Construct
KKDNNK

SEQ ID NO: 21392 - protein, 6 aa, ARTIFICIAL SEQUENCE
  Synthetic Construct
KKDNQK

SEQ ID NO: 21393 - protein, 6 aa, ARTIFICIAL SEQUENCE
  Synthetic Construct
KKDNRK

SEQ ID NO: 21394 - protein, 6 aa, ARTIFICIAL SEQUENCE
  Synthetic Construct
KKDNSK

SEQ ID NO: 21395 - protein, 6 aa, ARTIFICIAL SEQUENCE
  Synthetic Construct
KKDNTK

SEQ ID NO: 21396 - protein, 6 aa, ARTIFICIAL SEQUENCE
  Synthetic Construct
KKDNYK

SEQ ID NO: 21397 - protein, 6 aa, ARTIFICIAL SEQUENCE
  Synthetic Construct
KKDQAK

SEQ ID NO: 21398 - protein, 6 aa, ARTIFICIAL SEQUENCE
  Synthetic Construct
KKDQDK

SEQ ID NO: 21399 - protein, 6 aa, ARTIFICIAL SEQUENCE
  Synthetic Construct
KKDQEK

SEQ ID NO: 21400 - protein, 6 aa, ARTIFICIAL SEQUENCE
  Synthetic Construct
KKDQFK

SEQ ID NO: 21401 - protein, 6 aa, ARTIFICIAL SEQUENCE
  Synthetic Construct
KKDQGK

SEQ ID NO: 21402 - protein, 6 aa, ARTIFICIAL SEQUENCE
  Synthetic Construct
KKDQHK

SEQ ID NO: 21403 - protein, 6 aa, ARTIFICIAL SEQUENCE
  Synthetic Construct
KKDQIK

SEQ ID NO: 21404 - protein, 6 aa, ARTIFICIAL SEQUENCE
  Synthetic Construct
KKDQLK

SEQ ID NO: 21405 - protein, 6 aa, ARTIFICIAL SEQUENCE
  Synthetic Construct
KKDQNK

SEQ ID NO: 21406 - protein, 6 aa, ARTIFICIAL SEQUENCE
  Synthetic Construct
KKDQQK

SEQ ID NO: 21407 - protein, 6 aa, ARTIFICIAL SEQUENCE
  Synthetic Construct
KKDQRK

SEQ ID NO: 21408 - protein, 6 aa, ARTIFICIAL SEQUENCE
  Synthetic Construct
KKDQSK

SEQ ID NO: 21409 - protein, 6 aa, ARTIFICIAL SEQUENCE
  Synthetic Construct
KKDQTK

SEQ ID NO: 21410 - protein, 6 aa, ARTIFICIAL SEQUENCE
  Synthetic Construct
KKDQYK

SEQ ID NO: 21411 - protein, 6 aa, ARTIFICIAL SEQUENCE
  Synthetic Construct
KKDRAK

SEQ ID NO: 21412 - protein, 6 aa, ARTIFICIAL SEQUENCE
  Synthetic Construct
KKDRDK

SEQ ID NO: 21413 - protein, 6 aa, ARTIFICIAL SEQUENCE
  Synthetic Construct
KKDREK

SEQ ID NO: 21414 - protein, 6 aa, ARTIFICIAL SEQUENCE
  Synthetic Construct
KKDRFK

SEQ ID NO: 21415 - protein, 6 aa, ARTIFICIAL SEQUENCE
  Synthetic Construct
KKDRGK

SEQ ID NO: 21416 - protein, 6 aa, ARTIFICIAL SEQUENCE
  Synthetic Construct
KKDRHK

SEQ ID NO: 21417 - protein, 6 aa, ARTIFICIAL SEQUENCE
  Synthetic Construct
KKDRIK

SEQ ID NO: 21418 - protein, 6 aa, ARTIFICIAL SEQUENCE
  Synthetic Construct
KKDRLK

SEQ ID NO: 21419 - protein, 6 aa, ARTIFICIAL SEQUENCE
  Synthetic Construct
KKDRNK

SEQ ID NO: 21420 - protein, 6 aa, ARTIFICIAL SEQUENCE
  Synthetic Construct
KKDRQK

SEQ ID NO: 21421 - protein, 6 aa, ARTIFICIAL SEQUENCE
  Synthetic Construct
KKDRRK

SEQ ID NO: 21422 - protein, 6 aa, ARTIFICIAL SEQUENCE
  Synthetic Construct
KKDRSK

SEQ ID NO: 21423 - protein, 6 aa, ARTIFICIAL SEQUENCE
  Synthetic Construct
KKDRTK

SEQ ID NO: 21424 - protein, 6 aa, ARTIFICIAL SEQUENCE
  Synthetic Construct
KKDRYK

SEQ ID NO: 21425 - protein, 6 aa, ARTIFICIAL SEQUENCE
  Synthetic Construct
KKDSAK

SEQ ID NO: 21426 - protein, 6 aa, ARTIFICIAL SEQUENCE
  Synthetic Construct
KKDSDK

SEQ ID NO: 21427 - protein, 6 aa, ARTIFICIAL SEQUENCE
  Synthetic Construct
KKDSEK

SEQ ID NO: 21428 - protein, 6 aa, ARTIFICIAL SEQUENCE
  Synthetic Construct
KKDSFK

SEQ ID NO: 21429 - protein, 6 aa, ARTIFICIAL SEQUENCE
  Synthetic Construct
KKDSGK

SEQ ID NO: 21430 - protein, 6 aa, ARTIFICIAL SEQUENCE
  Synthetic Construct
KKDSHK

SEQ ID NO: 21431 - protein, 6 aa, ARTIFICIAL SEQUENCE
  Synthetic Construct
KKDSIK

SEQ ID NO: 21432 - protein, 6 aa, ARTIFICIAL SEQUENCE
  Synthetic Construct
KKDSLK

SEQ ID NO: 21433 - protein, 6 aa, ARTIFICIAL SEQUENCE
  Synthetic Construct
KKDSNK

SEQ ID NO: 21434 - protein, 6 aa, ARTIFICIAL SEQUENCE
  Synthetic Construct
KKDSQK

SEQ ID NO: 21435 - protein, 6 aa, ARTIFICIAL SEQUENCE
  Synthetic Construct
KKDSRK

SEQ ID NO: 21436 - protein, 6 aa, ARTIFICIAL SEQUENCE
  Synthetic Construct
KKDSSK

SEQ ID NO: 21437 - protein, 6 aa, ARTIFICIAL SEQUENCE
  Synthetic Construct
KKDSTK

SEQ ID NO: 21438 - protein, 6 aa, ARTIFICIAL SEQUENCE
  Synthetic Construct
KKDSYK

SEQ ID NO: 21439 - protein, 6 aa, ARTIFICIAL SEQUENCE
  Synthetic Construct
KKDTAK

SEQ ID NO: 21440 - protein, 6 aa, ARTIFICIAL SEQUENCE
  Synthetic Construct
KKDTDK

SEQ ID NO: 21441 - protein, 6 aa, ARTIFICIAL SEQUENCE
  Synthetic Construct
KKDTEK

SEQ ID NO: 21442 - protein, 6 aa, ARTIFICIAL SEQUENCE
  Synthetic Construct
KKDTFK

SEQ ID NO: 21443 - protein, 6 aa, ARTIFICIAL SEQUENCE
  Synthetic Construct
KKDTGK

SEQ ID NO: 21444 - protein, 6 aa, ARTIFICIAL SEQUENCE
  Synthetic Construct
KKDTHK

SEQ ID NO: 21445 - protein, 6 aa, ARTIFICIAL SEQUENCE
  Synthetic Construct
KKDTIK

SEQ ID NO: 21446 - protein, 6 aa, ARTIFICIAL SEQUENCE
  Synthetic Construct
KKDTLK

SEQ ID NO: 21447 - protein, 6 aa, ARTIFICIAL SEQUENCE
  Synthetic Construct
KKDTNK

SEQ ID NO: 21448 - protein, 6 aa, ARTIFICIAL SEQUENCE
  Synthetic Construct
KKDTQK

SEQ ID NO: 21449 - protein, 6 aa, ARTIFICIAL SEQUENCE
  Synthetic Construct
KKDTRK

SEQ ID NO: 21450 - protein, 6 aa, ARTIFICIAL SEQUENCE
  Synthetic Construct
KKDTSK

SEQ ID NO: 21451 - protein, 6 aa, ARTIFICIAL SEQUENCE
  Synthetic Construct
KKDTTK

SEQ ID NO: 21452 - protein, 6 aa, ARTIFICIAL SEQUENCE
  Synthetic Construct
KKDTYK

SEQ ID NO: 21453 - protein, 6 aa, ARTIFICIAL SEQUENCE
  Synthetic Construct
KKDYAK

SEQ ID NO: 21454 - protein, 6 aa, ARTIFICIAL SEQUENCE
  Synthetic Construct
KKDYDK

SEQ ID NO: 21455 - protein, 6 aa, ARTIFICIAL SEQUENCE
  Synthetic Construct
KKDYEK

SEQ ID NO: 21456 - protein, 6 aa, ARTIFICIAL SEQUENCE
  Synthetic Construct
KKDYFK

SEQ ID NO: 21457 - protein, 6 aa, ARTIFICIAL SEQUENCE
  Synthetic Construct
KKDYGK

SEQ ID NO: 21458 - protein, 6 aa, ARTIFICIAL SEQUENCE
  Synthetic Construct
KKDYHK

SEQ ID NO: 21459 - protein, 6 aa, ARTIFICIAL SEQUENCE
  Synthetic Construct
KKDYIK

SEQ ID NO: 21460 - protein, 6 aa, ARTIFICIAL SEQUENCE
  Synthetic Construct
KKDYLK

SEQ ID NO: 21461 - protein, 6 aa, ARTIFICIAL SEQUENCE
  Synthetic Construct
KKDYNK

SEQ ID NO: 21462 - protein, 6 aa, ARTIFICIAL SEQUENCE
  Synthetic Construct
KKDYQK

SEQ ID NO: 21463 - protein, 6 aa, ARTIFICIAL SEQUENCE
  Synthetic Construct
KKDYRK

SEQ ID NO: 21464 - protein, 6 aa, ARTIFICIAL SEQUENCE
  Synthetic Construct
KKDYSK

SEQ ID NO: 21465 - protein, 6 aa, ARTIFICIAL SEQUENCE
  Synthetic Construct
KKDYTK

SEQ ID NO: 21466 - protein, 6 aa, ARTIFICIAL SEQUENCE
  Synthetic Construct
KKDYYK

SEQ ID NO: 21467 - protein, 6 aa, ARTIFICIAL SEQUENCE
  Synthetic Construct
KKEAAK

SEQ ID NO: 21468 - protein, 6 aa, ARTIFICIAL SEQUENCE
  Synthetic Construct
KKEADK

SEQ ID NO: 21469 - protein, 6 aa, ARTIFICIAL SEQUENCE
  Synthetic Construct
KKEAEK

SEQ ID NO: 21470 - protein, 6 aa, ARTIFICIAL SEQUENCE
  Synthetic Construct
KKEAFK

SEQ ID NO: 21471 - protein, 6 aa, ARTIFICIAL SEQUENCE
  Synthetic Construct
KKEAGK

SEQ ID NO: 21472 - protein, 6 aa, ARTIFICIAL SEQUENCE
  Synthetic Construct
KKEAHK

SEQ ID NO: 21473 - protein, 6 aa, ARTIFICIAL SEQUENCE
  Synthetic Construct
KKEAIK

SEQ ID NO: 21474 - protein, 6 aa, ARTIFICIAL SEQUENCE
  Synthetic Construct
KKEALK

SEQ ID NO: 21475 - protein, 6 aa, ARTIFICIAL SEQUENCE
  Synthetic Construct
KKEANK

SEQ ID NO: 21476 - protein, 6 aa, ARTIFICIAL SEQUENCE
  Synthetic Construct
KKEAQK

SEQ ID NO: 21477 - protein, 6 aa, ARTIFICIAL SEQUENCE
  Synthetic Construct
KKEARK

SEQ ID NO: 21478 - protein, 6 aa, ARTIFICIAL SEQUENCE
  Synthetic Construct
KKEASK

SEQ ID NO: 21479 - protein, 6 aa, ARTIFICIAL SEQUENCE
  Synthetic Construct
KKEATK

SEQ ID NO: 21480 - protein, 6 aa, ARTIFICIAL SEQUENCE
  Synthetic Construct
KKEAYK

SEQ ID NO: 21481 - protein, 6 aa, ARTIFICIAL SEQUENCE
  Synthetic Construct
KKEDAK

SEQ ID NO: 21482 - protein, 6 aa, ARTIFICIAL SEQUENCE
  Synthetic Construct
KKEDDK

SEQ ID NO: 21483 - protein, 6 aa, ARTIFICIAL SEQUENCE
  Synthetic Construct
KKEDEK

SEQ ID NO: 21484 - protein, 6 aa, ARTIFICIAL SEQUENCE
  Synthetic Construct
KKEDFK

SEQ ID NO: 21485 - protein, 6 aa, ARTIFICIAL SEQUENCE
  Synthetic Construct
KKEDGK

SEQ ID NO: 21486 - protein, 6 aa, ARTIFICIAL SEQUENCE
  Synthetic Construct
KKEDHK

SEQ ID NO: 21487 - protein, 6 aa, ARTIFICIAL SEQUENCE
  Synthetic Construct
KKEDIK

SEQ ID NO: 21488 - protein, 6 aa, ARTIFICIAL SEQUENCE
  Synthetic Construct
KKEDLK

SEQ ID NO: 21489 - protein, 6 aa, ARTIFICIAL SEQUENCE
  Synthetic Construct
KKEDNK

SEQ ID NO: 21490 - protein, 6 aa, ARTIFICIAL SEQUENCE
  Synthetic Construct
KKEDQK

SEQ ID NO: 21491 - protein, 6 aa, ARTIFICIAL SEQUENCE
  Synthetic Construct
KKEDRK

SEQ ID NO: 21492 - protein, 6 aa, ARTIFICIAL SEQUENCE
  Synthetic Construct
KKEDSK

SEQ ID NO: 21493 - protein, 6 aa, ARTIFICIAL SEQUENCE
  Synthetic Construct
KKEDTK

SEQ ID NO: 21494 - protein, 6 aa, ARTIFICIAL SEQUENCE
  Synthetic Construct
KKEDYK

SEQ ID NO: 21495 - protein, 6 aa, ARTIFICIAL SEQUENCE
  Synthetic Construct
KKEEAK

SEQ ID NO: 21496 - protein, 6 aa, ARTIFICIAL SEQUENCE
  Synthetic Construct
KKEEDK

SEQ ID NO: 21497 - protein, 6 aa, ARTIFICIAL SEQUENCE
  Synthetic Construct
KKEEEK

SEQ ID NO: 21498 - protein, 6 aa, ARTIFICIAL SEQUENCE
  Synthetic Construct
KKEEFK

SEQ ID NO: 21499 - protein, 6 aa, ARTIFICIAL SEQUENCE
  Synthetic Construct
KKEEGK

SEQ ID NO: 21500 - protein, 6 aa, ARTIFICIAL SEQUENCE
  Synthetic Construct
KKEEHK

SEQ ID NO: 21501 - protein, 6 aa, ARTIFICIAL SEQUENCE
  Synthetic Construct
KKEEIK

SEQ ID NO: 21502 - protein, 6 aa, ARTIFICIAL SEQUENCE
  Synthetic Construct
KKEELK

SEQ ID NO: 21503 - protein, 6 aa, ARTIFICIAL SEQUENCE
  Synthetic Construct
KKEENK

SEQ ID NO: 21504 - protein, 6 aa, ARTIFICIAL SEQUENCE
  Synthetic Construct
KKEEQK

SEQ ID NO: 21505 - protein, 6 aa, ARTIFICIAL SEQUENCE
  Synthetic Construct
KKEERK

SEQ ID NO: 21506 - protein, 6 aa, ARTIFICIAL SEQUENCE
  Synthetic Construct
KKEESK

SEQ ID NO: 21507 - protein, 6 aa, ARTIFICIAL SEQUENCE
  Synthetic Construct
KKEETK

SEQ ID NO: 21508 - protein, 6 aa, ARTIFICIAL SEQUENCE
  Synthetic Construct
KKEEYK

SEQ ID NO: 21509 - protein, 6 aa, ARTIFICIAL SEQUENCE
  Synthetic Construct
KKEFAK

SEQ ID NO: 21510 - protein, 6 aa, ARTIFICIAL SEQUENCE
  Synthetic Construct
KKEFDK

SEQ ID NO: 21511 - protein, 6 aa, ARTIFICIAL SEQUENCE
  Synthetic Construct
KKEFEK

SEQ ID NO: 21512 - protein, 6 aa, ARTIFICIAL SEQUENCE
  Synthetic Construct
KKEFFK

SEQ ID NO: 21513 - protein, 6 aa, ARTIFICIAL SEQUENCE
  Synthetic Construct
KKEFGK

SEQ ID NO: 21514 - protein, 6 aa, ARTIFICIAL SEQUENCE
  Synthetic Construct
KKEFHK

SEQ ID NO: 21515 - protein, 6 aa, ARTIFICIAL SEQUENCE
  Synthetic Construct
KKEFIK

SEQ ID NO: 21516 - protein, 6 aa, ARTIFICIAL SEQUENCE
  Synthetic Construct
KKEFLK

SEQ ID NO: 21517 - protein, 6 aa, ARTIFICIAL SEQUENCE
  Synthetic Construct
KKEFNK

SEQ ID NO: 21518 - protein, 6 aa, ARTIFICIAL SEQUENCE
  Synthetic Construct
KKEFQK

SEQ ID NO: 21519 - protein, 6 aa, ARTIFICIAL SEQUENCE
  Synthetic Construct
KKEFRK

SEQ ID NO: 21520 - protein, 6 aa, ARTIFICIAL SEQUENCE
  Synthetic Construct
KKEFSK

SEQ ID NO: 21521 - protein, 6 aa, ARTIFICIAL SEQUENCE
  Synthetic Construct
KKEFTK

SEQ ID NO: 21522 - protein, 6 aa, ARTIFICIAL SEQUENCE
  Synthetic Construct
KKEFYK

SEQ ID NO: 21523 - protein, 6 aa, ARTIFICIAL SEQUENCE
  Synthetic Construct
KKEGAK

SEQ ID NO: 21524 - protein, 6 aa, ARTIFICIAL SEQUENCE
  Synthetic Construct
KKEGDK

SEQ ID NO: 21525 - protein, 6 aa, ARTIFICIAL SEQUENCE
  Synthetic Construct
KKEGEK

SEQ ID NO: 21526 - protein, 6 aa, ARTIFICIAL SEQUENCE
  Synthetic Construct
KKEGFK

SEQ ID NO: 21527 - protein, 6 aa, ARTIFICIAL SEQUENCE
  Synthetic Construct
KKEGGK

SEQ ID NO: 21528 - protein, 6 aa, ARTIFICIAL SEQUENCE
  Synthetic Construct
KKEGHK

SEQ ID NO: 21529 - protein, 6 aa, ARTIFICIAL SEQUENCE
  Synthetic Construct
KKEGIK

SEQ ID NO: 21530 - protein, 6 aa, ARTIFICIAL SEQUENCE
  Synthetic Construct
KKEGLK

SEQ ID NO: 21531 - protein, 6 aa, ARTIFICIAL SEQUENCE
  Synthetic Construct
KKEGNK

SEQ ID NO: 21532 - protein, 6 aa, ARTIFICIAL SEQUENCE
  Synthetic Construct
KKEGQK

SEQ ID NO: 21533 - protein, 6 aa, ARTIFICIAL SEQUENCE
  Synthetic Construct
KKEGRK

SEQ ID NO: 21534 - protein, 6 aa, ARTIFICIAL SEQUENCE
  Synthetic Construct
KKEGSK

SEQ ID NO: 21535 - protein, 6 aa, ARTIFICIAL SEQUENCE
  Synthetic Construct
KKEGTK

SEQ ID NO: 21536 - protein, 6 aa, ARTIFICIAL SEQUENCE
  Synthetic Construct
KKEGYK

SEQ ID NO: 21537 - protein, 6 aa, ARTIFICIAL SEQUENCE
  Synthetic Construct
KKEHAK

SEQ ID NO: 21538 - protein, 6 aa, ARTIFICIAL SEQUENCE
  Synthetic Construct
KKEHDK

SEQ ID NO: 21539 - protein, 6 aa, ARTIFICIAL SEQUENCE
  Synthetic Construct
KKEHEK

SEQ ID NO: 21540 - protein, 6 aa, ARTIFICIAL SEQUENCE
  Synthetic Construct
KKEHFK

SEQ ID NO: 21541 - protein, 6 aa, ARTIFICIAL SEQUENCE
  Synthetic Construct
KKEHGK

SEQ ID NO: 21542 - protein, 6 aa, ARTIFICIAL SEQUENCE
  Synthetic Construct
KKEHHK

SEQ ID NO: 21543 - protein, 6 aa, ARTIFICIAL SEQUENCE
  Synthetic Construct
KKEHIK

SEQ ID NO: 21544 - protein, 6 aa, ARTIFICIAL SEQUENCE
  Synthetic Construct
KKEHLK

SEQ ID NO: 21545 - protein, 6 aa, ARTIFICIAL SEQUENCE
  Synthetic Construct
KKEHNK

SEQ ID NO: 21546 - protein, 6 aa, ARTIFICIAL SEQUENCE
  Synthetic Construct
KKEHQK

SEQ ID NO: 21547 - protein, 6 aa, ARTIFICIAL SEQUENCE
  Synthetic Construct
KKEHRK

SEQ ID NO: 21548 - protein, 6 aa, ARTIFICIAL SEQUENCE
  Synthetic Construct
KKEHSK

SEQ ID NO: 21549 - protein, 6 aa, ARTIFICIAL SEQUENCE
  Synthetic Construct
KKEHTK

SEQ ID NO: 21550 - protein, 6 aa, ARTIFICIAL SEQUENCE
  Synthetic Construct
KKEHYK

SEQ ID NO: 21551 - protein, 6 aa, ARTIFICIAL SEQUENCE
  Synthetic Construct
KKEIAK

SEQ ID NO: 21552 - protein, 6 aa, ARTIFICIAL SEQUENCE
  Synthetic Construct
KKEIDK

SEQ ID NO: 21553 - protein, 6 aa, ARTIFICIAL SEQUENCE
  Synthetic Construct
KKEIEK

SEQ ID NO: 21554 - protein, 6 aa, ARTIFICIAL SEQUENCE
  Synthetic Construct
KKEIFK

SEQ ID NO: 21555 - protein, 6 aa, ARTIFICIAL SEQUENCE
  Synthetic Construct
KKEIGK

SEQ ID NO: 21556 - protein, 6 aa, ARTIFICIAL SEQUENCE
  Synthetic Construct
KKEIHK

SEQ ID NO: 21557 - protein, 6 aa, ARTIFICIAL SEQUENCE
  Synthetic Construct
KKEIIK

SEQ ID NO: 21558 - protein, 6 aa, ARTIFICIAL SEQUENCE
  Synthetic Construct
KKEILK

SEQ ID NO: 21559 - protein, 6 aa, ARTIFICIAL SEQUENCE
  Synthetic Construct
KKEINK

SEQ ID NO: 21560 - protein, 6 aa, ARTIFICIAL SEQUENCE
  Synthetic Construct
KKEIQK

SEQ ID NO: 21561 - protein, 6 aa, ARTIFICIAL SEQUENCE
  Synthetic Construct
KKEIRK

SEQ ID NO: 21562 - protein, 6 aa, ARTIFICIAL SEQUENCE
  Synthetic Construct
KKEISK

SEQ ID NO: 21563 - protein, 6 aa, ARTIFICIAL SEQUENCE
  Synthetic Construct
KKEITK

SEQ ID NO: 21564 - protein, 6 aa, ARTIFICIAL SEQUENCE
  Synthetic Construct
KKEIYK

SEQ ID NO: 21565 - protein, 6 aa, ARTIFICIAL SEQUENCE
  Synthetic Construct
KKELAK

SEQ ID NO: 21566 - protein, 6 aa, ARTIFICIAL SEQUENCE
  Synthetic Construct
KKELDK

SEQ ID NO: 21567 - protein, 6 aa, ARTIFICIAL SEQUENCE
  Synthetic Construct
KKELEK

SEQ ID NO: 21568 - protein, 6 aa, ARTIFICIAL SEQUENCE
  Synthetic Construct
KKELFK

SEQ ID NO: 21569 - protein, 6 aa, ARTIFICIAL SEQUENCE
  Synthetic Construct
KKELGK

SEQ ID NO: 21570 - protein, 6 aa, ARTIFICIAL SEQUENCE
  Synthetic Construct
KKELHK

SEQ ID NO: 21571 - protein, 6 aa, ARTIFICIAL SEQUENCE
  Synthetic Construct
KKELIK

SEQ ID NO: 21572 - protein, 6 aa, ARTIFICIAL SEQUENCE
  Synthetic Construct
KKELLK

SEQ ID NO: 21573 - protein, 6 aa, ARTIFICIAL SEQUENCE
  Synthetic Construct
KKELNK

SEQ ID NO: 21574 - protein, 6 aa, ARTIFICIAL SEQUENCE
  Synthetic Construct
KKELQK

SEQ ID NO: 21575 - protein, 6 aa, ARTIFICIAL SEQUENCE
  Synthetic Construct
KKELRK

SEQ ID NO: 21576 - protein, 6 aa, ARTIFICIAL SEQUENCE
  Synthetic Construct
KKELSK

SEQ ID NO: 21577 - protein, 6 aa, ARTIFICIAL SEQUENCE
  Synthetic Construct
KKELTK

SEQ ID NO: 21578 - protein, 6 aa, ARTIFICIAL SEQUENCE
  Synthetic Construct
KKELYK

SEQ ID NO: 21579 - protein, 6 aa, ARTIFICIAL SEQUENCE
  Synthetic Construct
KKENAK

SEQ ID NO: 21580 - protein, 6 aa, ARTIFICIAL SEQUENCE
  Synthetic Construct
KKENDK

SEQ ID NO: 21581 - protein, 6 aa, ARTIFICIAL SEQUENCE
  Synthetic Construct
KKENEK

SEQ ID NO: 21582 - protein, 6 aa, ARTIFICIAL SEQUENCE
  Synthetic Construct
KKENFK

SEQ ID NO: 21583 - protein, 6 aa, ARTIFICIAL SEQUENCE
  Synthetic Construct
KKENGK

SEQ ID NO: 21584 - protein, 6 aa, ARTIFICIAL SEQUENCE
  Synthetic Construct
KKENHK

SEQ ID NO: 21585 - protein, 6 aa, ARTIFICIAL SEQUENCE
  Synthetic Construct
KKENIK

SEQ ID NO: 21586 - protein, 6 aa, ARTIFICIAL SEQUENCE
  Synthetic Construct
KKENLK

SEQ ID NO: 21587 - protein, 6 aa, ARTIFICIAL SEQUENCE
  Synthetic Construct
KKENNK

SEQ ID NO: 21588 - protein, 6 aa, ARTIFICIAL SEQUENCE
  Synthetic Construct
KKENQK

SEQ ID NO: 21589 - protein, 6 aa, ARTIFICIAL SEQUENCE
  Synthetic Construct
KKENRK

SEQ ID NO: 21590 - protein, 6 aa, ARTIFICIAL SEQUENCE
  Synthetic Construct
KKENSK

SEQ ID NO: 21591 - protein, 6 aa, ARTIFICIAL SEQUENCE
  Synthetic Construct
KKENTK

SEQ ID NO: 21592 - protein, 6 aa, ARTIFICIAL SEQUENCE
  Synthetic Construct
KKENYK

SEQ ID NO: 21593 - protein, 6 aa, ARTIFICIAL SEQUENCE
  Synthetic Construct
KKEQAK

SEQ ID NO: 21594 - protein, 6 aa, ARTIFICIAL SEQUENCE
  Synthetic Construct
KKEQDK

SEQ ID NO: 21595 - protein, 6 aa, ARTIFICIAL SEQUENCE
  Synthetic Construct
KKEQEK

SEQ ID NO: 21596 - protein, 6 aa, ARTIFICIAL SEQUENCE
  Synthetic Construct
KKEQFK

SEQ ID NO: 21597 - protein, 6 aa, ARTIFICIAL SEQUENCE
  Synthetic Construct
KKEQGK

SEQ ID NO: 21598 - protein, 6 aa, ARTIFICIAL SEQUENCE
  Synthetic Construct
KKEQHK

SEQ ID NO: 21599 - protein, 6 aa, ARTIFICIAL SEQUENCE
  Synthetic Construct
KKEQIK

SEQ ID NO: 21600 - protein, 6 aa, ARTIFICIAL SEQUENCE
  Synthetic Construct
KKEQLK

SEQ ID NO: 21601 - protein, 6 aa, ARTIFICIAL SEQUENCE
  Synthetic Construct
KKEQNK

SEQ ID NO: 21602 - protein, 6 aa, ARTIFICIAL SEQUENCE
  Synthetic Construct
KKEQQK

SEQ ID NO: 21603 - protein, 6 aa, ARTIFICIAL SEQUENCE
  Synthetic Construct
KKEQRK

SEQ ID NO: 21604 - protein, 6 aa, ARTIFICIAL SEQUENCE
  Synthetic Construct
KKEQSK

SEQ ID NO: 21605 - protein, 6 aa, ARTIFICIAL SEQUENCE
  Synthetic Construct
KKEQTK

SEQ ID NO: 21606 - protein, 6 aa, ARTIFICIAL SEQUENCE
  Synthetic Construct
KKEQYK

SEQ ID NO: 21607 - protein, 6 aa, ARTIFICIAL SEQUENCE
  Synthetic Construct
KKERAK

SEQ ID NO: 21608 - protein, 6 aa, ARTIFICIAL SEQUENCE
  Synthetic Construct
KKERDK

SEQ ID NO: 21609 - protein, 6 aa, ARTIFICIAL SEQUENCE
  Synthetic Construct
KKEREK

SEQ ID NO: 21610 - protein, 6 aa, ARTIFICIAL SEQUENCE
  Synthetic Construct
KKERFK

SEQ ID NO: 21611 - protein, 6 aa, ARTIFICIAL SEQUENCE
  Synthetic Construct
KKERGK

SEQ ID NO: 21612 - protein, 6 aa, ARTIFICIAL SEQUENCE
  Synthetic Construct
KKERHK

SEQ ID NO: 21613 - protein, 6 aa, ARTIFICIAL SEQUENCE
  Synthetic Construct
KKERIK

SEQ ID NO: 21614 - protein, 6 aa, ARTIFICIAL SEQUENCE
  Synthetic Construct
KKERLK

SEQ ID NO: 21615 - protein, 6 aa, ARTIFICIAL SEQUENCE
  Synthetic Construct
KKERNK

SEQ ID NO: 21616 - protein, 6 aa, ARTIFICIAL SEQUENCE
  Synthetic Construct
KKERQK

SEQ ID NO: 21617 - protein, 6 aa, ARTIFICIAL SEQUENCE
  Synthetic Construct
KKERRK

SEQ ID NO: 21618 - protein, 6 aa, ARTIFICIAL SEQUENCE
  Synthetic Construct
KKERSK

SEQ ID NO: 21619 - protein, 6 aa, ARTIFICIAL SEQUENCE
  Synthetic Construct
KKERTK

SEQ ID NO: 21620 - protein, 6 aa, ARTIFICIAL SEQUENCE
  Synthetic Construct
KKERYK

SEQ ID NO: 21621 - protein, 6 aa, ARTIFICIAL SEQUENCE
  Synthetic Construct
KKESAK

SEQ ID NO: 21622 - protein, 6 aa, ARTIFICIAL SEQUENCE
  Synthetic Construct
KKESDK

SEQ ID NO: 21623 - protein, 6 aa, ARTIFICIAL SEQUENCE
  Synthetic Construct
KKESEK

SEQ ID NO: 21624 - protein, 6 aa, ARTIFICIAL SEQUENCE
  Synthetic Construct
KKESFK

SEQ ID NO: 21625 - protein, 6 aa, ARTIFICIAL SEQUENCE
  Synthetic Construct
KKESGK

SEQ ID NO: 21626 - protein, 6 aa, ARTIFICIAL SEQUENCE
  Synthetic Construct
KKESHK

SEQ ID NO: 21627 - protein, 6 aa, ARTIFICIAL SEQUENCE
  Synthetic Construct
KKESIK

SEQ ID NO: 21628 - protein, 6 aa, ARTIFICIAL SEQUENCE
  Synthetic Construct
KKESLK

SEQ ID NO: 21629 - protein, 6 aa, ARTIFICIAL SEQUENCE
  Synthetic Construct
KKESNK

SEQ ID NO: 21630 - protein, 6 aa, ARTIFICIAL SEQUENCE
  Synthetic Construct
KKESQK

SEQ ID NO: 21631 - protein, 6 aa, ARTIFICIAL SEQUENCE
  Synthetic Construct
KKESRK

SEQ ID NO: 21632 - protein, 6 aa, ARTIFICIAL SEQUENCE
  Synthetic Construct
KKESSK

SEQ ID NO: 21633 - protein, 6 aa, ARTIFICIAL SEQUENCE
  Synthetic Construct
KKESTK

SEQ ID NO: 21634 - protein, 6 aa, ARTIFICIAL SEQUENCE
  Synthetic Construct
KKESYK

SEQ ID NO: 21635 - protein, 6 aa, ARTIFICIAL SEQUENCE
  Synthetic Construct
KKETAK

SEQ ID NO: 21636 - protein, 6 aa, ARTIFICIAL SEQUENCE
  Synthetic Construct
KKETDK

SEQ ID NO: 21637 - protein, 6 aa, ARTIFICIAL SEQUENCE
  Synthetic Construct
KKETEK

SEQ ID NO: 21638 - protein, 6 aa, ARTIFICIAL SEQUENCE
  Synthetic Construct
KKETFK

SEQ ID NO: 21639 - protein, 6 aa, ARTIFICIAL SEQUENCE
  Synthetic Construct
KKETGK

SEQ ID NO: 21640 - protein, 6 aa, ARTIFICIAL SEQUENCE
  Synthetic Construct
KKETHK

SEQ ID NO: 21641 - protein, 6 aa, ARTIFICIAL SEQUENCE
  Synthetic Construct
KKETIK

SEQ ID NO: 21642 - protein, 6 aa, ARTIFICIAL SEQUENCE
  Synthetic Construct
KKETLK

SEQ ID NO: 21643 - protein, 6 aa, ARTIFICIAL SEQUENCE
  Synthetic Construct
KKETNK

SEQ ID NO: 21644 - protein, 6 aa, ARTIFICIAL SEQUENCE
  Synthetic Construct
KKETQK

SEQ ID NO: 21645 - protein, 6 aa, ARTIFICIAL SEQUENCE
  Synthetic Construct
KKETRK

SEQ ID NO: 21646 - protein, 6 aa, ARTIFICIAL SEQUENCE
  Synthetic Construct
KKETSK

SEQ ID NO: 21647 - protein, 6 aa, ARTIFICIAL SEQUENCE
  Synthetic Construct
KKETTK

SEQ ID NO: 21648 - protein, 6 aa, ARTIFICIAL SEQUENCE
  Synthetic Construct
KKETYK

SEQ ID NO: 21649 - protein, 6 aa, ARTIFICIAL SEQUENCE
  Synthetic Construct
KKEYAK

SEQ ID NO: 21650 - protein, 6 aa, ARTIFICIAL SEQUENCE
  Synthetic Construct
KKEYDK

SEQ ID NO: 21651 - protein, 6 aa, ARTIFICIAL SEQUENCE
  Synthetic Construct
KKEYEK

SEQ ID NO: 21652 - protein, 6 aa, ARTIFICIAL SEQUENCE
  Synthetic Construct
KKEYFK

SEQ ID NO: 21653 - protein, 6 aa, ARTIFICIAL SEQUENCE
  Synthetic Construct
KKEYGK

SEQ ID NO: 21654 - protein, 6 aa, ARTIFICIAL SEQUENCE
  Synthetic Construct
KKEYHK

SEQ ID NO: 21655 - protein, 6 aa, ARTIFICIAL SEQUENCE
  Synthetic Construct
KKEYIK

SEQ ID NO: 21656 - protein, 6 aa, ARTIFICIAL SEQUENCE
  Synthetic Construct
KKEYLK

SEQ ID NO: 21657 - protein, 6 aa, ARTIFICIAL SEQUENCE
  Synthetic Construct
KKEYNK

SEQ ID NO: 21658 - protein, 6 aa, ARTIFICIAL SEQUENCE
  Synthetic Construct
KKEYQK

SEQ ID NO: 21659 - protein, 6 aa, ARTIFICIAL SEQUENCE
  Synthetic Construct
KKEYRK

SEQ ID NO: 21660 - protein, 6 aa, ARTIFICIAL SEQUENCE
  Synthetic Construct
KKEYSK

SEQ ID NO: 21661 - protein, 6 aa, ARTIFICIAL SEQUENCE
  Synthetic Construct
KKEYTK

SEQ ID NO: 21662 - protein, 6 aa, ARTIFICIAL SEQUENCE
  Synthetic Construct
KKEYYK

SEQ ID NO: 21663 - protein, 6 aa, ARTIFICIAL SEQUENCE
  Synthetic Construct
KKFAAK

SEQ ID NO: 21664 - protein, 6 aa, ARTIFICIAL SEQUENCE
  Synthetic Construct
KKFADK

SEQ ID NO: 21665 - protein, 6 aa, ARTIFICIAL SEQUENCE
  Synthetic Construct
KKFAEK

SEQ ID NO: 21666 - protein, 6 aa, ARTIFICIAL SEQUENCE
  Synthetic Construct
KKFAFK

SEQ ID NO: 21667 - protein, 6 aa, ARTIFICIAL SEQUENCE
  Synthetic Construct
KKFAGK

SEQ ID NO: 21668 - protein, 6 aa, ARTIFICIAL SEQUENCE
  Synthetic Construct
KKFAHK

SEQ ID NO: 21669 - protein, 6 aa, ARTIFICIAL SEQUENCE
  Synthetic Construct
KKFAIK

SEQ ID NO: 21670 - protein, 6 aa, ARTIFICIAL SEQUENCE
  Synthetic Construct
KKFALK

SEQ ID NO: 21671 - protein, 6 aa, ARTIFICIAL SEQUENCE
  Synthetic Construct
KKFANK

SEQ ID NO: 21672 - protein, 6 aa, ARTIFICIAL SEQUENCE
  Synthetic Construct
KKFAQK

SEQ ID NO: 21673 - protein, 6 aa, ARTIFICIAL SEQUENCE
  Synthetic Construct
KKFARK

SEQ ID NO: 21674 - protein, 6 aa, ARTIFICIAL SEQUENCE
  Synthetic Construct
KKFASK

SEQ ID NO: 21675 - protein, 6 aa, ARTIFICIAL SEQUENCE
  Synthetic Construct
KKFATK

SEQ ID NO: 21676 - protein, 6 aa, ARTIFICIAL SEQUENCE
  Synthetic Construct
KKFAYK

SEQ ID NO: 21677 - protein, 6 aa, ARTIFICIAL SEQUENCE
  Synthetic Construct
KKFDAK

SEQ ID NO: 21678 - protein, 6 aa, ARTIFICIAL SEQUENCE
  Synthetic Construct
KKFDDK

SEQ ID NO: 21679 - protein, 6 aa, ARTIFICIAL SEQUENCE
  Synthetic Construct
KKFDEK

SEQ ID NO: 21680 - protein, 6 aa, ARTIFICIAL SEQUENCE
  Synthetic Construct
KKFDFK

SEQ ID NO: 21681 - protein, 6 aa, ARTIFICIAL SEQUENCE
  Synthetic Construct
KKFDGK

SEQ ID NO: 21682 - protein, 6 aa, ARTIFICIAL SEQUENCE
  Synthetic Construct
KKFDHK

SEQ ID NO: 21683 - protein, 6 aa, ARTIFICIAL SEQUENCE
  Synthetic Construct
KKFDIK

SEQ ID NO: 21684 - protein, 6 aa, ARTIFICIAL SEQUENCE
  Synthetic Construct
KKFDLK

SEQ ID NO: 21685 - protein, 6 aa, ARTIFICIAL SEQUENCE
  Synthetic Construct
KKFDNK

SEQ ID NO: 21686 - protein, 6 aa, ARTIFICIAL SEQUENCE
  Synthetic Construct
KKFDQK

SEQ ID NO: 21687 - protein, 6 aa, ARTIFICIAL SEQUENCE
  Synthetic Construct
KKFDRK

SEQ ID NO: 21688 - protein, 6 aa, ARTIFICIAL SEQUENCE
  Synthetic Construct
KKFDSK

SEQ ID NO: 21689 - protein, 6 aa, ARTIFICIAL SEQUENCE
  Synthetic Construct
KKFDTK

SEQ ID NO: 21690 - protein, 6 aa, ARTIFICIAL SEQUENCE
  Synthetic Construct
KKFDYK

SEQ ID NO: 21691 - protein, 6 aa, ARTIFICIAL SEQUENCE
  Synthetic Construct
KKFEAK

SEQ ID NO: 21692 - protein, 6 aa, ARTIFICIAL SEQUENCE
  Synthetic Construct
KKFEDK

SEQ ID NO: 21693 - protein, 6 aa, ARTIFICIAL SEQUENCE
  Synthetic Construct
KKFEEK

SEQ ID NO: 21694 - protein, 6 aa, ARTIFICIAL SEQUENCE
  Synthetic Construct
KKFEFK

SEQ ID NO: 21695 - protein, 6 aa, ARTIFICIAL SEQUENCE
  Synthetic Construct
KKFEGK

SEQ ID NO: 21696 - protein, 6 aa, ARTIFICIAL SEQUENCE
  Synthetic Construct
KKFEHK

SEQ ID NO: 21697 - protein, 6 aa, ARTIFICIAL SEQUENCE
  Synthetic Construct
KKFEIK

SEQ ID NO: 21698 - protein, 6 aa, ARTIFICIAL SEQUENCE
  Synthetic Construct
KKFELK

SEQ ID NO: 21699 - protein, 6 aa, ARTIFICIAL SEQUENCE
  Synthetic Construct
KKFENK

SEQ ID NO: 21700 - protein, 6 aa, ARTIFICIAL SEQUENCE
  Synthetic Construct
KKFEQK

SEQ ID NO: 21701 - protein, 6 aa, ARTIFICIAL SEQUENCE
  Synthetic Construct
KKFERK

SEQ ID NO: 21702 - protein, 6 aa, ARTIFICIAL SEQUENCE
  Synthetic Construct
KKFESK

SEQ ID NO: 21703 - protein, 6 aa, ARTIFICIAL SEQUENCE
  Synthetic Construct
KKFETK

SEQ ID NO: 21704 - protein, 6 aa, ARTIFICIAL SEQUENCE
  Synthetic Construct
KKFEYK

SEQ ID NO: 21705 - protein, 6 aa, ARTIFICIAL SEQUENCE
  Synthetic Construct
KKFFAK

SEQ ID NO: 21706 - protein, 6 aa, ARTIFICIAL SEQUENCE
  Synthetic Construct
KKFFDK

SEQ ID NO: 21707 - protein, 6 aa, ARTIFICIAL SEQUENCE
  Synthetic Construct
KKFFEK

SEQ ID NO: 21708 - protein, 6 aa, ARTIFICIAL SEQUENCE
  Synthetic Construct
KKFFFK

SEQ ID NO: 21709 - protein, 6 aa, ARTIFICIAL SEQUENCE
  Synthetic Construct
KKFFGK

SEQ ID NO: 21710 - protein, 6 aa, ARTIFICIAL SEQUENCE
  Synthetic Construct
KKFFHK

SEQ ID NO: 21711 - protein, 6 aa, ARTIFICIAL SEQUENCE
  Synthetic Construct
KKFFIK

SEQ ID NO: 21712 - protein, 6 aa, ARTIFICIAL SEQUENCE
  Synthetic Construct
KKFFLK

SEQ ID NO: 21713 - protein, 6 aa, ARTIFICIAL SEQUENCE
  Synthetic Construct
KKFFNK

SEQ ID NO: 21714 - protein, 6 aa, ARTIFICIAL SEQUENCE
  Synthetic Construct
KKFFQK

SEQ ID NO: 21715 - protein, 6 aa, ARTIFICIAL SEQUENCE
  Synthetic Construct
KKFFRK

SEQ ID NO: 21716 - protein, 6 aa, ARTIFICIAL SEQUENCE
  Synthetic Construct
KKFFSK

SEQ ID NO: 21717 - protein, 6 aa, ARTIFICIAL SEQUENCE
  Synthetic Construct
KKFFTK

SEQ ID NO: 21718 - protein, 6 aa, ARTIFICIAL SEQUENCE
  Synthetic Construct
KKFFYK

SEQ ID NO: 21719 - protein, 6 aa, ARTIFICIAL SEQUENCE
  Synthetic Construct
KKFGAK

SEQ ID NO: 21720 - protein, 6 aa, ARTIFICIAL SEQUENCE
  Synthetic Construct
KKFGDK

SEQ ID NO: 21721 - protein, 6 aa, ARTIFICIAL SEQUENCE
  Synthetic Construct
KKFGEK

SEQ ID NO: 21722 - protein, 6 aa, ARTIFICIAL SEQUENCE
  Synthetic Construct
KKFGFK

SEQ ID NO: 21723 - protein, 6 aa, ARTIFICIAL SEQUENCE
  Synthetic Construct
KKFGGK

SEQ ID NO: 21724 - protein, 6 aa, ARTIFICIAL SEQUENCE
  Synthetic Construct
KKFGHK

SEQ ID NO: 21725 - protein, 6 aa, ARTIFICIAL SEQUENCE
  Synthetic Construct
KKFGIK

SEQ ID NO: 21726 - protein, 6 aa, ARTIFICIAL SEQUENCE
  Synthetic Construct
KKFGLK

SEQ ID NO: 21727 - protein, 6 aa, ARTIFICIAL SEQUENCE
  Synthetic Construct
KKFGNK

SEQ ID NO: 21728 - protein, 6 aa, ARTIFICIAL SEQUENCE
  Synthetic Construct
KKFGQK

SEQ ID NO: 21729 - protein, 6 aa, ARTIFICIAL SEQUENCE
  Synthetic Construct
KKFGRK

SEQ ID NO: 21730 - protein, 6 aa, ARTIFICIAL SEQUENCE
  Synthetic Construct
KKFGSK

SEQ ID NO: 21731 - protein, 6 aa, ARTIFICIAL SEQUENCE
  Synthetic Construct
KKFGTK

SEQ ID NO: 21732 - protein, 6 aa, ARTIFICIAL SEQUENCE
  Synthetic Construct
KKFGYK

SEQ ID NO: 21733 - protein, 6 aa, ARTIFICIAL SEQUENCE
  Synthetic Construct
KKFHAK

SEQ ID NO: 21734 - protein, 6 aa, ARTIFICIAL SEQUENCE
  Synthetic Construct
KKFHDK

SEQ ID NO: 21735 - protein, 6 aa, ARTIFICIAL SEQUENCE
  Synthetic Construct
KKFHEK

SEQ ID NO: 21736 - protein, 6 aa, ARTIFICIAL SEQUENCE
  Synthetic Construct
KKFHFK

SEQ ID NO: 21737 - protein, 6 aa, ARTIFICIAL SEQUENCE
  Synthetic Construct
KKFHGK

SEQ ID NO: 21738 - protein, 6 aa, ARTIFICIAL SEQUENCE
  Synthetic Construct
KKFHHK

SEQ ID NO: 21739 - protein, 6 aa, ARTIFICIAL SEQUENCE
  Synthetic Construct
KKFHIK

SEQ ID NO: 21740 - protein, 6 aa, ARTIFICIAL SEQUENCE
  Synthetic Construct
KKFHLK

SEQ ID NO: 21741 - protein, 6 aa, ARTIFICIAL SEQUENCE
  Synthetic Construct
KKFHNK

SEQ ID NO: 21742 - protein, 6 aa, ARTIFICIAL SEQUENCE
  Synthetic Construct
KKFHQK

SEQ ID NO: 21743 - protein, 6 aa, ARTIFICIAL SEQUENCE
  Synthetic Construct
KKFHRK

SEQ ID NO: 21744 - protein, 6 aa, ARTIFICIAL SEQUENCE
  Synthetic Construct
KKFHSK

SEQ ID NO: 21745 - protein, 6 aa, ARTIFICIAL SEQUENCE
  Synthetic Construct
KKFHTK

SEQ ID NO: 21746 - protein, 6 aa, ARTIFICIAL SEQUENCE
  Synthetic Construct
KKFHYK

SEQ ID NO: 21747 - protein, 6 aa, ARTIFICIAL SEQUENCE
  Synthetic Construct
KKFIAK

SEQ ID NO: 21748 - protein, 6 aa, ARTIFICIAL SEQUENCE
  Synthetic Construct
KKFIDK

SEQ ID NO: 21749 - protein, 6 aa, ARTIFICIAL SEQUENCE
  Synthetic Construct
KKFIEK

SEQ ID NO: 21750 - protein, 6 aa, ARTIFICIAL SEQUENCE
  Synthetic Construct
KKFIFK

SEQ ID NO: 21751 - protein, 6 aa, ARTIFICIAL SEQUENCE
  Synthetic Construct
KKFIGK

SEQ ID NO: 21752 - protein, 6 aa, ARTIFICIAL SEQUENCE
  Synthetic Construct
KKFIHK

SEQ ID NO: 21753 - protein, 6 aa, ARTIFICIAL SEQUENCE
  Synthetic Construct
KKFIIK

SEQ ID NO: 21754 - protein, 6 aa, ARTIFICIAL SEQUENCE
  Synthetic Construct
KKFILK

SEQ ID NO: 21755 - protein, 6 aa, ARTIFICIAL SEQUENCE
  Synthetic Construct
KKFINK

SEQ ID NO: 21756 - protein, 6 aa, ARTIFICIAL SEQUENCE
  Synthetic Construct
KKFIQK

SEQ ID NO: 21757 - protein, 6 aa, ARTIFICIAL SEQUENCE
  Synthetic Construct
KKFIRK

SEQ ID NO: 21758 - protein, 6 aa, ARTIFICIAL SEQUENCE
  Synthetic Construct
KKFISK

SEQ ID NO: 21759 - protein, 6 aa, ARTIFICIAL SEQUENCE
  Synthetic Construct
KKFITK

SEQ ID NO: 21760 - protein, 6 aa, ARTIFICIAL SEQUENCE
  Synthetic Construct
KKFIYK

SEQ ID NO: 21761 - protein, 6 aa, ARTIFICIAL SEQUENCE
  Synthetic Construct
KKFLAK

SEQ ID NO: 21762 - protein, 6 aa, ARTIFICIAL SEQUENCE
  Synthetic Construct
KKFLDK

SEQ ID NO: 21763 - protein, 6 aa, ARTIFICIAL SEQUENCE
  Synthetic Construct
KKFLEK

SEQ ID NO: 21764 - protein, 6 aa, ARTIFICIAL SEQUENCE
  Synthetic Construct
KKFLFK

SEQ ID NO: 21765 - protein, 6 aa, ARTIFICIAL SEQUENCE
  Synthetic Construct
KKFLGK

SEQ ID NO: 21766 - protein, 6 aa, ARTIFICIAL SEQUENCE
  Synthetic Construct
KKFLHK

SEQ ID NO: 21767 - protein, 6 aa, ARTIFICIAL SEQUENCE
  Synthetic Construct
KKFLIK

SEQ ID NO: 21768 - protein, 6 aa, ARTIFICIAL SEQUENCE
  Synthetic Construct
KKFLLK

SEQ ID NO: 21769 - protein, 6 aa, ARTIFICIAL SEQUENCE
  Synthetic Construct
KKFLNK

SEQ ID NO: 21770 - protein, 6 aa, ARTIFICIAL SEQUENCE
  Synthetic Construct
KKFLQK

SEQ ID NO: 21771 - protein, 6 aa, ARTIFICIAL SEQUENCE
  Synthetic Construct
KKFLRK

SEQ ID NO: 21772 - protein, 6 aa, ARTIFICIAL SEQUENCE
  Synthetic Construct
KKFLSK

SEQ ID NO: 21773 - protein, 6 aa, ARTIFICIAL SEQUENCE
  Synthetic Construct
KKFLTK

SEQ ID NO: 21774 - protein, 6 aa, ARTIFICIAL SEQUENCE
  Synthetic Construct
KKFLYK

SEQ ID NO: 21775 - protein, 6 aa, ARTIFICIAL SEQUENCE
  Synthetic Construct
KKFNAK

SEQ ID NO: 21776 - protein, 6 aa, ARTIFICIAL SEQUENCE
  Synthetic Construct
KKFNDK

SEQ ID NO: 21777 - protein, 6 aa, ARTIFICIAL SEQUENCE
  Synthetic Construct
KKFNEK

SEQ ID NO: 21778 - protein, 6 aa, ARTIFICIAL SEQUENCE
  Synthetic Construct
KKFNFK

SEQ ID NO: 21779 - protein, 6 aa, ARTIFICIAL SEQUENCE
  Synthetic Construct
KKFNGK

SEQ ID NO: 21780 - protein, 6 aa, ARTIFICIAL SEQUENCE
  Synthetic Construct
KKFNHK

SEQ ID NO: 21781 - protein, 6 aa, ARTIFICIAL SEQUENCE
  Synthetic Construct
KKFNIK

SEQ ID NO: 21782 - protein, 6 aa, ARTIFICIAL SEQUENCE
  Synthetic Construct
KKFNLK

SEQ ID NO: 21783 - protein, 6 aa, ARTIFICIAL SEQUENCE
  Synthetic Construct
KKFNNK

SEQ ID NO: 21784 - protein, 6 aa, ARTIFICIAL SEQUENCE
  Synthetic Construct
KKFNQK

SEQ ID NO: 21785 - protein, 6 aa, ARTIFICIAL SEQUENCE
  Synthetic Construct
KKFNRK

SEQ ID NO: 21786 - protein, 6 aa, ARTIFICIAL SEQUENCE
  Synthetic Construct
KKFNSK

SEQ ID NO: 21787 - protein, 6 aa, ARTIFICIAL SEQUENCE
  Synthetic Construct
KKFNTK

SEQ ID NO: 21788 - protein, 6 aa, ARTIFICIAL SEQUENCE
  Synthetic Construct
KKFNYK

SEQ ID NO: 21789 - protein, 6 aa, ARTIFICIAL SEQUENCE
  Synthetic Construct
KKFQAK

SEQ ID NO: 21790 - protein, 6 aa, ARTIFICIAL SEQUENCE
  Synthetic Construct
KKFQDK

SEQ ID NO: 21791 - protein, 6 aa, ARTIFICIAL SEQUENCE
  Synthetic Construct
KKFQEK

SEQ ID NO: 21792 - protein, 6 aa, ARTIFICIAL SEQUENCE
  Synthetic Construct
KKFQFK

SEQ ID NO: 21793 - protein, 6 aa, ARTIFICIAL SEQUENCE
  Synthetic Construct
KKFQGK

SEQ ID NO: 21794 - protein, 6 aa, ARTIFICIAL SEQUENCE
  Synthetic Construct
KKFQHK

SEQ ID NO: 21795 - protein, 6 aa, ARTIFICIAL SEQUENCE
  Synthetic Construct
KKFQIK

SEQ ID NO: 21796 - protein, 6 aa, ARTIFICIAL SEQUENCE
  Synthetic Construct
KKFQLK

SEQ ID NO: 21797 - protein, 6 aa, ARTIFICIAL SEQUENCE
  Synthetic Construct
KKFQNK

SEQ ID NO: 21798 - protein, 6 aa, ARTIFICIAL SEQUENCE
  Synthetic Construct
KKFQQK

SEQ ID NO: 21799 - protein, 6 aa, ARTIFICIAL SEQUENCE
  Synthetic Construct
KKFQRK

SEQ ID NO: 21800 - protein, 6 aa, ARTIFICIAL SEQUENCE
  Synthetic Construct
KKFQSK

SEQ ID NO: 21801 - protein, 6 aa, ARTIFICIAL SEQUENCE
  Synthetic Construct
KKFQTK

SEQ ID NO: 21802 - protein, 6 aa, ARTIFICIAL SEQUENCE
  Synthetic Construct
KKFQYK

SEQ ID NO: 21803 - protein, 6 aa, ARTIFICIAL SEQUENCE
  Synthetic Construct
KKFRAK

SEQ ID NO: 21804 - protein, 6 aa, ARTIFICIAL SEQUENCE
  Synthetic Construct
KKFRDK

SEQ ID NO: 21805 - protein, 6 aa, ARTIFICIAL SEQUENCE
  Synthetic Construct
KKFREK

SEQ ID NO: 21806 - protein, 6 aa, ARTIFICIAL SEQUENCE
  Synthetic Construct
KKFRFK

SEQ ID NO: 21807 - protein, 6 aa, ARTIFICIAL SEQUENCE
  Synthetic Construct
KKFRGK

SEQ ID NO: 21808 - protein, 6 aa, ARTIFICIAL SEQUENCE
  Synthetic Construct
KKFRHK

SEQ ID NO: 21809 - protein, 6 aa, ARTIFICIAL SEQUENCE
  Synthetic Construct
KKFRIK

SEQ ID NO: 21810 - protein, 6 aa, ARTIFICIAL SEQUENCE
  Synthetic Construct
KKFRLK

SEQ ID NO: 21811 - protein, 6 aa, ARTIFICIAL SEQUENCE
  Synthetic Construct
KKFRNK

SEQ ID NO: 21812 - protein, 6 aa, ARTIFICIAL SEQUENCE
  Synthetic Construct
KKFRQK

SEQ ID NO: 21813 - protein, 6 aa, ARTIFICIAL SEQUENCE
  Synthetic Construct
KKFRRK

SEQ ID NO: 21814 - protein, 6 aa, ARTIFICIAL SEQUENCE
  Synthetic Construct
KKFRSK

SEQ ID NO: 21815 - protein, 6 aa, ARTIFICIAL SEQUENCE
  Synthetic Construct
KKFRTK

SEQ ID NO: 21816 - protein, 6 aa, ARTIFICIAL SEQUENCE
  Synthetic Construct
KKFRYK

SEQ ID NO: 21817 - protein, 6 aa, ARTIFICIAL SEQUENCE
  Synthetic Construct
KKFSAK

SEQ ID NO: 21818 - protein, 6 aa, ARTIFICIAL SEQUENCE
  Synthetic Construct
KKFSDK

SEQ ID NO: 21819 - protein, 6 aa, ARTIFICIAL SEQUENCE
  Synthetic Construct
KKFSEK

SEQ ID NO: 21820 - protein, 6 aa, ARTIFICIAL SEQUENCE
  Synthetic Construct
KKFSFK

SEQ ID NO: 21821 - protein, 6 aa, ARTIFICIAL SEQUENCE
  Synthetic Construct
KKFSGK

SEQ ID NO: 21822 - protein, 6 aa, ARTIFICIAL SEQUENCE
  Synthetic Construct
KKFSHK

SEQ ID NO: 21823 - protein, 6 aa, ARTIFICIAL SEQUENCE
  Synthetic Construct
KKFSIK

SEQ ID NO: 21824 - protein, 6 aa, ARTIFICIAL SEQUENCE
  Synthetic Construct
KKFSLK

SEQ ID NO: 21825 - protein, 6 aa, ARTIFICIAL SEQUENCE
  Synthetic Construct
KKFSNK

SEQ ID NO: 21826 - protein, 6 aa, ARTIFICIAL SEQUENCE
  Synthetic Construct
KKFSQK

SEQ ID NO: 21827 - protein, 6 aa, ARTIFICIAL SEQUENCE
  Synthetic Construct
KKFSRK

SEQ ID NO: 21828 - protein, 6 aa, ARTIFICIAL SEQUENCE
  Synthetic Construct
KKFSSK

SEQ ID NO: 21829 - protein, 6 aa, ARTIFICIAL SEQUENCE
  Synthetic Construct
KKFSTK

SEQ ID NO: 21830 - protein, 6 aa, ARTIFICIAL SEQUENCE
  Synthetic Construct
KKFSYK

SEQ ID NO: 21831 - protein, 6 aa, ARTIFICIAL SEQUENCE
  Synthetic Construct
KKFTAK

SEQ ID NO: 21832 - protein, 6 aa, ARTIFICIAL SEQUENCE
  Synthetic Construct
KKFTDK

SEQ ID NO: 21833 - protein, 6 aa, ARTIFICIAL SEQUENCE
  Synthetic Construct
KKFTEK

SEQ ID NO: 21834 - protein, 6 aa, ARTIFICIAL SEQUENCE
  Synthetic Construct
KKFTFK

SEQ ID NO: 21835 - protein, 6 aa, ARTIFICIAL SEQUENCE
  Synthetic Construct
KKFTGK

SEQ ID NO: 21836 - protein, 6 aa, ARTIFICIAL SEQUENCE
  Synthetic Construct
KKFTHK

SEQ ID NO: 21837 - protein, 6 aa, ARTIFICIAL SEQUENCE
  Synthetic Construct
KKFTIK

SEQ ID NO: 21838 - protein, 6 aa, ARTIFICIAL SEQUENCE
  Synthetic Construct
KKFTLK

SEQ ID NO: 21839 - protein, 6 aa, ARTIFICIAL SEQUENCE
  Synthetic Construct
KKFTNK

SEQ ID NO: 21840 - protein, 6 aa, ARTIFICIAL SEQUENCE
  Synthetic Construct
KKFTQK

SEQ ID NO: 21841 - protein, 6 aa, ARTIFICIAL SEQUENCE
  Synthetic Construct
KKFTRK

SEQ ID NO: 21842 - protein, 6 aa, ARTIFICIAL SEQUENCE
  Synthetic Construct
KKFTSK

SEQ ID NO: 21843 - protein, 6 aa, ARTIFICIAL SEQUENCE
  Synthetic Construct
KKFTTK

SEQ ID NO: 21844 - protein, 6 aa, ARTIFICIAL SEQUENCE
  Synthetic Construct
KKFTYK

SEQ ID NO: 21845 - protein, 6 aa, ARTIFICIAL SEQUENCE
  Synthetic Construct
KKFYAK

SEQ ID NO: 21846 - protein, 6 aa, ARTIFICIAL SEQUENCE
  Synthetic Construct
KKFYDK

SEQ ID NO: 21847 - protein, 6 aa, ARTIFICIAL SEQUENCE
  Synthetic Construct
KKFYEK

SEQ ID NO: 21848 - protein, 6 aa, ARTIFICIAL SEQUENCE
  Synthetic Construct
KKFYFK

SEQ ID NO: 21849 - protein, 6 aa, ARTIFICIAL SEQUENCE
  Synthetic Construct
KKFYGK

SEQ ID NO: 21850 - protein, 6 aa, ARTIFICIAL SEQUENCE
  Synthetic Construct
KKFYHK

SEQ ID NO: 21851 - protein, 6 aa, ARTIFICIAL SEQUENCE
  Synthetic Construct
KKFYIK

SEQ ID NO: 21852 - protein, 6 aa, ARTIFICIAL SEQUENCE
  Synthetic Construct
KKFYLK

SEQ ID NO: 21853 - protein, 6 aa, ARTIFICIAL SEQUENCE
  Synthetic Construct
KKFYNK

SEQ ID NO: 21854 - protein, 6 aa, ARTIFICIAL SEQUENCE
  Synthetic Construct
KKFYQK

SEQ ID NO: 21855 - protein, 6 aa, ARTIFICIAL SEQUENCE
  Synthetic Construct
KKFYRK

SEQ ID NO: 21856 - protein, 6 aa, ARTIFICIAL SEQUENCE
  Synthetic Construct
KKFYSK

SEQ ID NO: 21857 - protein, 6 aa, ARTIFICIAL SEQUENCE
  Synthetic Construct
KKFYTK

SEQ ID NO: 21858 - protein, 6 aa, ARTIFICIAL SEQUENCE
  Synthetic Construct
KKFYYK

SEQ ID NO: 21859 - protein, 6 aa, ARTIFICIAL SEQUENCE
  Synthetic Construct
KKGAAK

SEQ ID NO: 21860 - protein, 6 aa, ARTIFICIAL SEQUENCE
  Synthetic Construct
KKGADK

SEQ ID NO: 21861 - protein, 6 aa, ARTIFICIAL SEQUENCE
  Synthetic Construct
KKGAEK

SEQ ID NO: 21862 - protein, 6 aa, ARTIFICIAL SEQUENCE
  Synthetic Construct
KKGAFK

SEQ ID NO: 21863 - protein, 6 aa, ARTIFICIAL SEQUENCE
  Synthetic Construct
KKGAGK

SEQ ID NO: 21864 - protein, 6 aa, ARTIFICIAL SEQUENCE
  Synthetic Construct
KKGAHK

SEQ ID NO: 21865 - protein, 6 aa, ARTIFICIAL SEQUENCE
  Synthetic Construct
KKGAIK

SEQ ID NO: 21866 - protein, 6 aa, ARTIFICIAL SEQUENCE
  Synthetic Construct
KKGALK

SEQ ID NO: 21867 - protein, 6 aa, ARTIFICIAL SEQUENCE
  Synthetic Construct
KKGANK

SEQ ID NO: 21868 - protein, 6 aa, ARTIFICIAL SEQUENCE
  Synthetic Construct
KKGAQK

SEQ ID NO: 21869 - protein, 6 aa, ARTIFICIAL SEQUENCE
  Synthetic Construct
KKGARK

SEQ ID NO: 21870 - protein, 6 aa, ARTIFICIAL SEQUENCE
  Synthetic Construct
KKGASK

SEQ ID NO: 21871 - protein, 6 aa, ARTIFICIAL SEQUENCE
  Synthetic Construct
KKGATK

SEQ ID NO: 21872 - protein, 6 aa, ARTIFICIAL SEQUENCE
  Synthetic Construct
KKGAYK

SEQ ID NO: 21873 - protein, 6 aa, ARTIFICIAL SEQUENCE
  Synthetic Construct
KKGDAK

SEQ ID NO: 21874 - protein, 6 aa, ARTIFICIAL SEQUENCE
  Synthetic Construct
KKGDDK

SEQ ID NO: 21875 - protein, 6 aa, ARTIFICIAL SEQUENCE
  Synthetic Construct
KKGDEK

SEQ ID NO: 21876 - protein, 6 aa, ARTIFICIAL SEQUENCE
  Synthetic Construct
KKGDFK

SEQ ID NO: 21877 - protein, 6 aa, ARTIFICIAL SEQUENCE
  Synthetic Construct
KKGDGK

SEQ ID NO: 21878 - protein, 6 aa, ARTIFICIAL SEQUENCE
  Synthetic Construct
KKGDHK

SEQ ID NO: 21879 - protein, 6 aa, ARTIFICIAL SEQUENCE
  Synthetic Construct
KKGDIK

SEQ ID NO: 21880 - protein, 6 aa, ARTIFICIAL SEQUENCE
  Synthetic Construct
KKGDLK

SEQ ID NO: 21881 - protein, 6 aa, ARTIFICIAL SEQUENCE
  Synthetic Construct
KKGDNK

SEQ ID NO: 21882 - protein, 6 aa, ARTIFICIAL SEQUENCE
  Synthetic Construct
KKGDQK

SEQ ID NO: 21883 - protein, 6 aa, ARTIFICIAL SEQUENCE
  Synthetic Construct
KKGDRK

SEQ ID NO: 21884 - protein, 6 aa, ARTIFICIAL SEQUENCE
  Synthetic Construct
KKGDSK

SEQ ID NO: 21885 - protein, 6 aa, ARTIFICIAL SEQUENCE
  Synthetic Construct
KKGDTK

SEQ ID NO: 21886 - protein, 6 aa, ARTIFICIAL SEQUENCE
  Synthetic Construct
KKGDYK

SEQ ID NO: 21887 - protein, 6 aa, ARTIFICIAL SEQUENCE
  Synthetic Construct
KKGEAK

SEQ ID NO: 21888 - protein, 6 aa, ARTIFICIAL SEQUENCE
  Synthetic Construct
KKGEDK

SEQ ID NO: 21889 - protein, 6 aa, ARTIFICIAL SEQUENCE
  Synthetic Construct
KKGEEK

SEQ ID NO: 21890 - protein, 6 aa, ARTIFICIAL SEQUENCE
  Synthetic Construct
KKGEFK

SEQ ID NO: 21891 - protein, 6 aa, ARTIFICIAL SEQUENCE
  Synthetic Construct
KKGEGK

SEQ ID NO: 21892 - protein, 6 aa, ARTIFICIAL SEQUENCE
  Synthetic Construct
KKGEHK

SEQ ID NO: 21893 - protein, 6 aa, ARTIFICIAL SEQUENCE
  Synthetic Construct
KKGEIK

SEQ ID NO: 21894 - protein, 6 aa, ARTIFICIAL SEQUENCE
  Synthetic Construct
KKGELK

SEQ ID NO: 21895 - protein, 6 aa, ARTIFICIAL SEQUENCE
  Synthetic Construct
KKGENK

SEQ ID NO: 21896 - protein, 6 aa, ARTIFICIAL SEQUENCE
  Synthetic Construct
KKGEQK

SEQ ID NO: 21897 - protein, 6 aa, ARTIFICIAL SEQUENCE
  Synthetic Construct
KKGERK

SEQ ID NO: 21898 - protein, 6 aa, ARTIFICIAL SEQUENCE
  Synthetic Construct
KKGESK

SEQ ID NO: 21899 - protein, 6 aa, ARTIFICIAL SEQUENCE
  Synthetic Construct
KKGETK

SEQ ID NO: 21900 - protein, 6 aa, ARTIFICIAL SEQUENCE
  Synthetic Construct
KKGEYK

SEQ ID NO: 21901 - protein, 6 aa, ARTIFICIAL SEQUENCE
  Synthetic Construct
KKGFAK

SEQ ID NO: 21902 - protein, 6 aa, ARTIFICIAL SEQUENCE
  Synthetic Construct
KKGFDK

SEQ ID NO: 21903 - protein, 6 aa, ARTIFICIAL SEQUENCE
  Synthetic Construct
KKGFEK

SEQ ID NO: 21904 - protein, 6 aa, ARTIFICIAL SEQUENCE
  Synthetic Construct
KKGFFK

SEQ ID NO: 21905 - protein, 6 aa, ARTIFICIAL SEQUENCE
  Synthetic Construct
KKGFGK

SEQ ID NO: 21906 - protein, 6 aa, ARTIFICIAL SEQUENCE
  Synthetic Construct
KKGFHK

SEQ ID NO: 21907 - protein, 6 aa, ARTIFICIAL SEQUENCE
  Synthetic Construct
KKGFIK

SEQ ID NO: 21908 - protein, 6 aa, ARTIFICIAL SEQUENCE
  Synthetic Construct
KKGFLK

SEQ ID NO: 21909 - protein, 6 aa, ARTIFICIAL SEQUENCE
  Synthetic Construct
KKGFNK

SEQ ID NO: 21910 - protein, 6 aa, ARTIFICIAL SEQUENCE
  Synthetic Construct
KKGFQK

SEQ ID NO: 21911 - protein, 6 aa, ARTIFICIAL SEQUENCE
  Synthetic Construct
KKGFRK

SEQ ID NO: 21912 - protein, 6 aa, ARTIFICIAL SEQUENCE
  Synthetic Construct
KKGFSK

SEQ ID NO: 21913 - protein, 6 aa, ARTIFICIAL SEQUENCE
  Synthetic Construct
KKGFTK

SEQ ID NO: 21914 - protein, 6 aa, ARTIFICIAL SEQUENCE
  Synthetic Construct
KKGFYK

SEQ ID NO: 21915 - protein, 6 aa, ARTIFICIAL SEQUENCE
  Synthetic Construct
KKGGAK

SEQ ID NO: 21916 - protein, 6 aa, ARTIFICIAL SEQUENCE
  Synthetic Construct
KKGGDK

SEQ ID NO: 21917 - protein, 6 aa, ARTIFICIAL SEQUENCE
  Synthetic Construct
KKGGEK

SEQ ID NO: 21918 - protein, 6 aa, ARTIFICIAL SEQUENCE
  Synthetic Construct
KKGGFK

SEQ ID NO: 21919 - protein, 6 aa, ARTIFICIAL SEQUENCE
  Synthetic Construct
KKGGGK

SEQ ID NO: 21920 - protein, 6 aa, ARTIFICIAL SEQUENCE
  Synthetic Construct
KKGGHK

SEQ ID NO: 21921 - protein, 6 aa, ARTIFICIAL SEQUENCE
  Synthetic Construct
KKGGIK

SEQ ID NO: 21922 - protein, 6 aa, ARTIFICIAL SEQUENCE
  Synthetic Construct
KKGGLK

SEQ ID NO: 21923 - protein, 6 aa, ARTIFICIAL SEQUENCE
  Synthetic Construct
KKGGNK

SEQ ID NO: 21924 - protein, 6 aa, ARTIFICIAL SEQUENCE
  Synthetic Construct
KKGGQK

SEQ ID NO: 21925 - protein, 6 aa, ARTIFICIAL SEQUENCE
  Synthetic Construct
KKGGRK

SEQ ID NO: 21926 - protein, 6 aa, ARTIFICIAL SEQUENCE
  Synthetic Construct
KKGGSK

SEQ ID NO: 21927 - protein, 6 aa, ARTIFICIAL SEQUENCE
  Synthetic Construct
KKGGTK

SEQ ID NO: 21928 - protein, 6 aa, ARTIFICIAL SEQUENCE
  Synthetic Construct
KKGGYK

SEQ ID NO: 21929 - protein, 6 aa, ARTIFICIAL SEQUENCE
  Synthetic Construct
KKGHAK

SEQ ID NO: 21930 - protein, 6 aa, ARTIFICIAL SEQUENCE
  Synthetic Construct
KKGHDK

SEQ ID NO: 21931 - protein, 6 aa, ARTIFICIAL SEQUENCE
  Synthetic Construct
KKGHEK

SEQ ID NO: 21932 - protein, 6 aa, ARTIFICIAL SEQUENCE
  Synthetic Construct
KKGHFK

SEQ ID NO: 21933 - protein, 6 aa, ARTIFICIAL SEQUENCE
  Synthetic Construct
KKGHGK

SEQ ID NO: 21934 - protein, 6 aa, ARTIFICIAL SEQUENCE
  Synthetic Construct
KKGHHK

SEQ ID NO: 21935 - protein, 6 aa, ARTIFICIAL SEQUENCE
  Synthetic Construct
KKGHIK

SEQ ID NO: 21936 - protein, 6 aa, ARTIFICIAL SEQUENCE
  Synthetic Construct
KKGHLK

SEQ ID NO: 21937 - protein, 6 aa, ARTIFICIAL SEQUENCE
  Synthetic Construct
KKGHNK

SEQ ID NO: 21938 - protein, 6 aa, ARTIFICIAL SEQUENCE
  Synthetic Construct
KKGHQK

SEQ ID NO: 21939 - protein, 6 aa, ARTIFICIAL SEQUENCE
  Synthetic Construct
KKGHRK

SEQ ID NO: 21940 - protein, 6 aa, ARTIFICIAL SEQUENCE
  Synthetic Construct
KKGHSK

SEQ ID NO: 21941 - protein, 6 aa, ARTIFICIAL SEQUENCE
  Synthetic Construct
KKGHTK

SEQ ID NO: 21942 - protein, 6 aa, ARTIFICIAL SEQUENCE
  Synthetic Construct
KKGHYK

SEQ ID NO: 21943 - protein, 6 aa, ARTIFICIAL SEQUENCE
  Synthetic Construct
KKGIAK

SEQ ID NO: 21944 - protein, 6 aa, ARTIFICIAL SEQUENCE
  Synthetic Construct
KKGIDK

SEQ ID NO: 21945 - protein, 6 aa, ARTIFICIAL SEQUENCE
  Synthetic Construct
KKGIEK

SEQ ID NO: 21946 - protein, 6 aa, ARTIFICIAL SEQUENCE
  Synthetic Construct
KKGIFK

SEQ ID NO: 21947 - protein, 6 aa, ARTIFICIAL SEQUENCE
  Synthetic Construct
KKGIGK

SEQ ID NO: 21948 - protein, 6 aa, ARTIFICIAL SEQUENCE
  Synthetic Construct
KKGIHK

SEQ ID NO: 21949 - protein, 6 aa, ARTIFICIAL SEQUENCE
  Synthetic Construct
KKGIIK

SEQ ID NO: 21950 - protein, 6 aa, ARTIFICIAL SEQUENCE
  Synthetic Construct
KKGILK

SEQ ID NO: 21951 - protein, 6 aa, ARTIFICIAL SEQUENCE
  Synthetic Construct
KKGINK

SEQ ID NO: 21952 - protein, 6 aa, ARTIFICIAL SEQUENCE
  Synthetic Construct
KKGIQK

SEQ ID NO: 21953 - protein, 6 aa, ARTIFICIAL SEQUENCE
  Synthetic Construct
KKGIRK

SEQ ID NO: 21954 - protein, 6 aa, ARTIFICIAL SEQUENCE
  Synthetic Construct
KKGISK

SEQ ID NO: 21955 - protein, 6 aa, ARTIFICIAL SEQUENCE
  Synthetic Construct
KKGITK

SEQ ID NO: 21956 - protein, 6 aa, ARTIFICIAL SEQUENCE
  Synthetic Construct
KKGIYK

SEQ ID NO: 21957 - protein, 6 aa, ARTIFICIAL SEQUENCE
  Synthetic Construct
KKGLAK

SEQ ID NO: 21958 - protein, 6 aa, ARTIFICIAL SEQUENCE
  Synthetic Construct
KKGLDK

SEQ ID NO: 21959 - protein, 6 aa, ARTIFICIAL SEQUENCE
  Synthetic Construct
KKGLEK

SEQ ID NO: 21960 - protein, 6 aa, ARTIFICIAL SEQUENCE
  Synthetic Construct
KKGLFK

SEQ ID NO: 21961 - protein, 6 aa, ARTIFICIAL SEQUENCE
  Synthetic Construct
KKGLGK

SEQ ID NO: 21962 - protein, 6 aa, ARTIFICIAL SEQUENCE
  Synthetic Construct
KKGLHK

SEQ ID NO: 21963 - protein, 6 aa, ARTIFICIAL SEQUENCE
  Synthetic Construct
KKGLIK

SEQ ID NO: 21964 - protein, 6 aa, ARTIFICIAL SEQUENCE
  Synthetic Construct
KKGLLK

SEQ ID NO: 21965 - protein, 6 aa, ARTIFICIAL SEQUENCE
  Synthetic Construct
KKGLNK

SEQ ID NO: 21966 - protein, 6 aa, ARTIFICIAL SEQUENCE
  Synthetic Construct
KKGLQK

SEQ ID NO: 21967 - protein, 6 aa, ARTIFICIAL SEQUENCE
  Synthetic Construct
KKGLRK

SEQ ID NO: 21968 - protein, 6 aa, ARTIFICIAL SEQUENCE
  Synthetic Construct
KKGLSK

SEQ ID NO: 21969 - protein, 6 aa, ARTIFICIAL SEQUENCE
  Synthetic Construct
KKGLTK

SEQ ID NO: 21970 - protein, 6 aa, ARTIFICIAL SEQUENCE
  Synthetic Construct
KKGLYK

SEQ ID NO: 21971 - protein, 6 aa, ARTIFICIAL SEQUENCE
  Synthetic Construct
KKGNAK

SEQ ID NO: 21972 - protein, 6 aa, ARTIFICIAL SEQUENCE
  Synthetic Construct
KKGNDK

SEQ ID NO: 21973 - protein, 6 aa, ARTIFICIAL SEQUENCE
  Synthetic Construct
KKGNEK

SEQ ID NO: 21974 - protein, 6 aa, ARTIFICIAL SEQUENCE
  Synthetic Construct
KKGNFK

SEQ ID NO: 21975 - protein, 6 aa, ARTIFICIAL SEQUENCE
  Synthetic Construct
KKGNGK

SEQ ID NO: 21976 - protein, 6 aa, ARTIFICIAL SEQUENCE
  Synthetic Construct
KKGNHK

SEQ ID NO: 21977 - protein, 6 aa, ARTIFICIAL SEQUENCE
  Synthetic Construct
KKGNIK

SEQ ID NO: 21978 - protein, 6 aa, ARTIFICIAL SEQUENCE
  Synthetic Construct
KKGNLK

SEQ ID NO: 21979 - protein, 6 aa, ARTIFICIAL SEQUENCE
  Synthetic Construct
KKGNNK

SEQ ID NO: 21980 - protein, 6 aa, ARTIFICIAL SEQUENCE
  Synthetic Construct
KKGNQK

SEQ ID NO: 21981 - protein, 6 aa, ARTIFICIAL SEQUENCE
  Synthetic Construct
KKGNRK

SEQ ID NO: 21982 - protein, 6 aa, ARTIFICIAL SEQUENCE
  Synthetic Construct
KKGNSK

SEQ ID NO: 21983 - protein, 6 aa, ARTIFICIAL SEQUENCE
  Synthetic Construct
KKGNTK

SEQ ID NO: 21984 - protein, 6 aa, ARTIFICIAL SEQUENCE
  Synthetic Construct
KKGNYK

SEQ ID NO: 21985 - protein, 6 aa, ARTIFICIAL SEQUENCE
  Synthetic Construct
KKGQAK

SEQ ID NO: 21986 - protein, 6 aa, ARTIFICIAL SEQUENCE
  Synthetic Construct
KKGQDK

SEQ ID NO: 21987 - protein, 6 aa, ARTIFICIAL SEQUENCE
  Synthetic Construct
KKGQEK

SEQ ID NO: 21988 - protein, 6 aa, ARTIFICIAL SEQUENCE
  Synthetic Construct
KKGQFK

SEQ ID NO: 21989 - protein, 6 aa, ARTIFICIAL SEQUENCE
  Synthetic Construct
KKGQGK

SEQ ID NO: 21990 - protein, 6 aa, ARTIFICIAL SEQUENCE
  Synthetic Construct
KKGQHK

SEQ ID NO: 21991 - protein, 6 aa, ARTIFICIAL SEQUENCE
  Synthetic Construct
KKGQIK

SEQ ID NO: 21992 - protein, 6 aa, ARTIFICIAL SEQUENCE
  Synthetic Construct
KKGQLK

SEQ ID NO: 21993 - protein, 6 aa, ARTIFICIAL SEQUENCE
  Synthetic Construct
KKGQNK

SEQ ID NO: 21994 - protein, 6 aa, ARTIFICIAL SEQUENCE
  Synthetic Construct
KKGQQK

SEQ ID NO: 21995 - protein, 6 aa, ARTIFICIAL SEQUENCE
  Synthetic Construct
KKGQRK

SEQ ID NO: 21996 - protein, 6 aa, ARTIFICIAL SEQUENCE
  Synthetic Construct
KKGQSK

SEQ ID NO: 21997 - protein, 6 aa, ARTIFICIAL SEQUENCE
  Synthetic Construct
KKGQTK

SEQ ID NO: 21998 - protein, 6 aa, ARTIFICIAL SEQUENCE
  Synthetic Construct
KKGQYK

SEQ ID NO: 21999 - protein, 6 aa, ARTIFICIAL SEQUENCE
  Synthetic Construct
KKGRAK

SEQ ID NO: 22000 - protein, 6 aa, ARTIFICIAL SEQUENCE
  Synthetic Construct
KKGRDK

SEQ ID NO: 22001 - protein, 6 aa, ARTIFICIAL SEQUENCE
  Synthetic Construct
KKGREK

SEQ ID NO: 22002 - protein, 6 aa, ARTIFICIAL SEQUENCE
  Synthetic Construct
KKGRFK

SEQ ID NO: 22003 - protein, 6 aa, ARTIFICIAL SEQUENCE
  Synthetic Construct
KKGRGK

SEQ ID NO: 22004 - protein, 6 aa, ARTIFICIAL SEQUENCE
  Synthetic Construct
KKGRHK

SEQ ID NO: 22005 - protein, 6 aa, ARTIFICIAL SEQUENCE
  Synthetic Construct
KKGRIK

SEQ ID NO: 22006 - protein, 6 aa, ARTIFICIAL SEQUENCE
  Synthetic Construct
KKGRLK

SEQ ID NO: 22007 - protein, 6 aa, ARTIFICIAL SEQUENCE
  Synthetic Construct
KKGRNK

SEQ ID NO: 22008 - protein, 6 aa, ARTIFICIAL SEQUENCE
  Synthetic Construct
KKGRQK

SEQ ID NO: 22009 - protein, 6 aa, ARTIFICIAL SEQUENCE
  Synthetic Construct
KKGRRK

SEQ ID NO: 22010 - protein, 6 aa, ARTIFICIAL SEQUENCE
  Synthetic Construct
KKGRSK

SEQ ID NO: 22011 - protein, 6 aa, ARTIFICIAL SEQUENCE
  Synthetic Construct
KKGRTK

SEQ ID NO: 22012 - protein, 6 aa, ARTIFICIAL SEQUENCE
  Synthetic Construct
KKGRYK

SEQ ID NO: 22013 - protein, 6 aa, ARTIFICIAL SEQUENCE
  Synthetic Construct
KKGSAK

SEQ ID NO: 22014 - protein, 6 aa, ARTIFICIAL SEQUENCE
  Synthetic Construct
KKGSDK

SEQ ID NO: 22015 - protein, 6 aa, ARTIFICIAL SEQUENCE
  Synthetic Construct
KKGSEK

SEQ ID NO: 22016 - protein, 6 aa, ARTIFICIAL SEQUENCE
  Synthetic Construct
KKGSFK

SEQ ID NO: 22017 - protein, 6 aa, ARTIFICIAL SEQUENCE
  Synthetic Construct
KKGSGK

SEQ ID NO: 22018 - protein, 6 aa, ARTIFICIAL SEQUENCE
  Synthetic Construct
KKGSHK

SEQ ID NO: 22019 - protein, 6 aa, ARTIFICIAL SEQUENCE
  Synthetic Construct
KKGSIK

SEQ ID NO: 22020 - protein, 6 aa, ARTIFICIAL SEQUENCE
  Synthetic Construct
KKGSLK

SEQ ID NO: 22021 - protein, 6 aa, ARTIFICIAL SEQUENCE
  Synthetic Construct
KKGSNK

SEQ ID NO: 22022 - protein, 6 aa, ARTIFICIAL SEQUENCE
  Synthetic Construct
KKGSQK

SEQ ID NO: 22023 - protein, 6 aa, ARTIFICIAL SEQUENCE
  Synthetic Construct
KKGSRK

SEQ ID NO: 22024 - protein, 6 aa, ARTIFICIAL SEQUENCE
  Synthetic Construct
KKGSSK

SEQ ID NO: 22025 - protein, 6 aa, ARTIFICIAL SEQUENCE
  Synthetic Construct
KKGSTK

SEQ ID NO: 22026 - protein, 6 aa, ARTIFICIAL SEQUENCE
  Synthetic Construct
KKGSYK

SEQ ID NO: 22027 - protein, 6 aa, ARTIFICIAL SEQUENCE
  Synthetic Construct
KKGTAK

SEQ ID NO: 22028 - protein, 6 aa, ARTIFICIAL SEQUENCE
  Synthetic Construct
KKGTDK

SEQ ID NO: 22029 - protein, 6 aa, ARTIFICIAL SEQUENCE
  Synthetic Construct
KKGTEK

SEQ ID NO: 22030 - protein, 6 aa, ARTIFICIAL SEQUENCE
  Synthetic Construct
KKGTFK

SEQ ID NO: 22031 - protein, 6 aa, ARTIFICIAL SEQUENCE
  Synthetic Construct
KKGTGK

SEQ ID NO: 22032 - protein, 6 aa, ARTIFICIAL SEQUENCE
  Synthetic Construct
KKGTHK

SEQ ID NO: 22033 - protein, 6 aa, ARTIFICIAL SEQUENCE
  Synthetic Construct
KKGTIK

SEQ ID NO: 22034 - protein, 6 aa, ARTIFICIAL SEQUENCE
  Synthetic Construct
KKGTLK

SEQ ID NO: 22035 - protein, 6 aa, ARTIFICIAL SEQUENCE
  Synthetic Construct
KKGTNK

SEQ ID NO: 22036 - protein, 6 aa, ARTIFICIAL SEQUENCE
  Synthetic Construct
KKGTQK

SEQ ID NO: 22037 - protein, 6 aa, ARTIFICIAL SEQUENCE
  Synthetic Construct
KKGTRK

SEQ ID NO: 22038 - protein, 6 aa, ARTIFICIAL SEQUENCE
  Synthetic Construct
KKGTSK

SEQ ID NO: 22039 - protein, 6 aa, ARTIFICIAL SEQUENCE
  Synthetic Construct
KKGTTK

SEQ ID NO: 22040 - protein, 6 aa, ARTIFICIAL SEQUENCE
  Synthetic Construct
KKGTYK

SEQ ID NO: 22041 - protein, 6 aa, ARTIFICIAL SEQUENCE
  Synthetic Construct
KKGYAK

SEQ ID NO: 22042 - protein, 6 aa, ARTIFICIAL SEQUENCE
  Synthetic Construct
KKGYDK

SEQ ID NO: 22043 - protein, 6 aa, ARTIFICIAL SEQUENCE
  Synthetic Construct
KKGYEK

SEQ ID NO: 22044 - protein, 6 aa, ARTIFICIAL SEQUENCE
  Synthetic Construct
KKGYFK

SEQ ID NO: 22045 - protein, 6 aa, ARTIFICIAL SEQUENCE
  Synthetic Construct
KKGYGK

SEQ ID NO: 22046 - protein, 6 aa, ARTIFICIAL SEQUENCE
  Synthetic Construct
KKGYHK

SEQ ID NO: 22047 - protein, 6 aa, ARTIFICIAL SEQUENCE
  Synthetic Construct
KKGYIK

SEQ ID NO: 22048 - protein, 6 aa, ARTIFICIAL SEQUENCE
  Synthetic Construct
KKGYLK

SEQ ID NO: 22049 - protein, 6 aa, ARTIFICIAL SEQUENCE
  Synthetic Construct
KKGYNK

SEQ ID NO: 22050 - protein, 6 aa, ARTIFICIAL SEQUENCE
  Synthetic Construct
KKGYQK

SEQ ID NO: 22051 - protein, 6 aa, ARTIFICIAL SEQUENCE
  Synthetic Construct
KKGYRK

SEQ ID NO: 22052 - protein, 6 aa, ARTIFICIAL SEQUENCE
  Synthetic Construct
KKGYSK

SEQ ID NO: 22053 - protein, 6 aa, ARTIFICIAL SEQUENCE
  Synthetic Construct
KKGYTK

SEQ ID NO: 22054 - protein, 6 aa, ARTIFICIAL SEQUENCE
  Synthetic Construct
KKGYYK

SEQ ID NO: 22055 - protein, 6 aa, ARTIFICIAL SEQUENCE
  Synthetic Construct
KKHAAK

SEQ ID NO: 22056 - protein, 6 aa, ARTIFICIAL SEQUENCE
  Synthetic Construct
KKHADK

SEQ ID NO: 22057 - protein, 6 aa, ARTIFICIAL SEQUENCE
  Synthetic Construct
KKHAEK

SEQ ID NO: 22058 - protein, 6 aa, ARTIFICIAL SEQUENCE
  Synthetic Construct
KKHAFK

SEQ ID NO: 22059 - protein, 6 aa, ARTIFICIAL SEQUENCE
  Synthetic Construct
KKHAGK

SEQ ID NO: 22060 - protein, 6 aa, ARTIFICIAL SEQUENCE
  Synthetic Construct
KKHAHK

SEQ ID NO: 22061 - protein, 6 aa, ARTIFICIAL SEQUENCE
  Synthetic Construct
KKHAIK

SEQ ID NO: 22062 - protein, 6 aa, ARTIFICIAL SEQUENCE
  Synthetic Construct
KKHALK

SEQ ID NO: 22063 - protein, 6 aa, ARTIFICIAL SEQUENCE
  Synthetic Construct
KKHANK

SEQ ID NO: 22064 - protein, 6 aa, ARTIFICIAL SEQUENCE
  Synthetic Construct
KKHAQK

SEQ ID NO: 22065 - protein, 6 aa, ARTIFICIAL SEQUENCE
  Synthetic Construct
KKHARK

SEQ ID NO: 22066 - protein, 6 aa, ARTIFICIAL SEQUENCE
  Synthetic Construct
KKHASK

SEQ ID NO: 22067 - protein, 6 aa, ARTIFICIAL SEQUENCE
  Synthetic Construct
KKHATK

SEQ ID NO: 22068 - protein, 6 aa, ARTIFICIAL SEQUENCE
  Synthetic Construct
KKHAYK

SEQ ID NO: 22069 - protein, 6 aa, ARTIFICIAL SEQUENCE
  Synthetic Construct
KKHDAK

SEQ ID NO: 22070 - protein, 6 aa, ARTIFICIAL SEQUENCE
  Synthetic Construct
KKHDDK

SEQ ID NO: 22071 - protein, 6 aa, ARTIFICIAL SEQUENCE
  Synthetic Construct
KKHDEK

SEQ ID NO: 22072 - protein, 6 aa, ARTIFICIAL SEQUENCE
  Synthetic Construct
KKHDFK

SEQ ID NO: 22073 - protein, 6 aa, ARTIFICIAL SEQUENCE
  Synthetic Construct
KKHDGK

SEQ ID NO: 22074 - protein, 6 aa, ARTIFICIAL SEQUENCE
  Synthetic Construct
KKHDHK

SEQ ID NO: 22075 - protein, 6 aa, ARTIFICIAL SEQUENCE
  Synthetic Construct
KKHDIK

SEQ ID NO: 22076 - protein, 6 aa, ARTIFICIAL SEQUENCE
  Synthetic Construct
KKHDLK

SEQ ID NO: 22077 - protein, 6 aa, ARTIFICIAL SEQUENCE
  Synthetic Construct
KKHDNK

SEQ ID NO: 22078 - protein, 6 aa, ARTIFICIAL SEQUENCE
  Synthetic Construct
KKHDQK

SEQ ID NO: 22079 - protein, 6 aa, ARTIFICIAL SEQUENCE
  Synthetic Construct
KKHDRK

SEQ ID NO: 22080 - protein, 6 aa, ARTIFICIAL SEQUENCE
  Synthetic Construct
KKHDSK

SEQ ID NO: 22081 - protein, 6 aa, ARTIFICIAL SEQUENCE
  Synthetic Construct
KKHDTK

SEQ ID NO: 22082 - protein, 6 aa, ARTIFICIAL SEQUENCE
  Synthetic Construct
KKHDYK

SEQ ID NO: 22083 - protein, 6 aa, ARTIFICIAL SEQUENCE
  Synthetic Construct
KKHEAK

SEQ ID NO: 22084 - protein, 6 aa, ARTIFICIAL SEQUENCE
  Synthetic Construct
KKHEDK

SEQ ID NO: 22085 - protein, 6 aa, ARTIFICIAL SEQUENCE
  Synthetic Construct
KKHEEK

SEQ ID NO: 22086 - protein, 6 aa, ARTIFICIAL SEQUENCE
  Synthetic Construct
KKHEFK

SEQ ID NO: 22087 - protein, 6 aa, ARTIFICIAL SEQUENCE
  Synthetic Construct
KKHEGK

SEQ ID NO: 22088 - protein, 6 aa, ARTIFICIAL SEQUENCE
  Synthetic Construct
KKHEHK

SEQ ID NO: 22089 - protein, 6 aa, ARTIFICIAL SEQUENCE
  Synthetic Construct
KKHEIK

SEQ ID NO: 22090 - protein, 6 aa, ARTIFICIAL SEQUENCE
  Synthetic Construct
KKHELK

SEQ ID NO: 22091 - protein, 6 aa, ARTIFICIAL SEQUENCE
  Synthetic Construct
KKHENK

SEQ ID NO: 22092 - protein, 6 aa, ARTIFICIAL SEQUENCE
  Synthetic Construct
KKHEQK

SEQ ID NO: 22093 - protein, 6 aa, ARTIFICIAL SEQUENCE
  Synthetic Construct
KKHERK

SEQ ID NO: 22094 - protein, 6 aa, ARTIFICIAL SEQUENCE
  Synthetic Construct
KKHESK

SEQ ID NO: 22095 - protein, 6 aa, ARTIFICIAL SEQUENCE
  Synthetic Construct
KKHETK

SEQ ID NO: 22096 - protein, 6 aa, ARTIFICIAL SEQUENCE
  Synthetic Construct
KKHEYK

SEQ ID NO: 22097 - protein, 6 aa, ARTIFICIAL SEQUENCE
  Synthetic Construct
KKHFAK

SEQ ID NO: 22098 - protein, 6 aa, ARTIFICIAL SEQUENCE
  Synthetic Construct
KKHFDK

SEQ ID NO: 22099 - protein, 6 aa, ARTIFICIAL SEQUENCE
  Synthetic Construct
KKHFEK

SEQ ID NO: 22100 - protein, 6 aa, ARTIFICIAL SEQUENCE
  Synthetic Construct
KKHFFK

SEQ ID NO: 22101 - protein, 6 aa, ARTIFICIAL SEQUENCE
  Synthetic Construct
KKHFGK

SEQ ID NO: 22102 - protein, 6 aa, ARTIFICIAL SEQUENCE
  Synthetic Construct
KKHFHK

SEQ ID NO: 22103 - protein, 6 aa, ARTIFICIAL SEQUENCE
  Synthetic Construct
KKHFIK

SEQ ID NO: 22104 - protein, 6 aa, ARTIFICIAL SEQUENCE
  Synthetic Construct
KKHFLK

SEQ ID NO: 22105 - protein, 6 aa, ARTIFICIAL SEQUENCE
  Synthetic Construct
KKHFNK

SEQ ID NO: 22106 - protein, 6 aa, ARTIFICIAL SEQUENCE
  Synthetic Construct
KKHFQK

SEQ ID NO: 22107 - protein, 6 aa, ARTIFICIAL SEQUENCE
  Synthetic Construct
KKHFRK

SEQ ID NO: 22108 - protein, 6 aa, ARTIFICIAL SEQUENCE
  Synthetic Construct
KKHFSK

SEQ ID NO: 22109 - protein, 6 aa, ARTIFICIAL SEQUENCE
  Synthetic Construct
KKHFTK

SEQ ID NO: 22110 - protein, 6 aa, ARTIFICIAL SEQUENCE
  Synthetic Construct
KKHFYK

SEQ ID NO: 22111 - protein, 6 aa, ARTIFICIAL SEQUENCE
  Synthetic Construct
KKHGAK

SEQ ID NO: 22112 - protein, 6 aa, ARTIFICIAL SEQUENCE
  Synthetic Construct
KKHGDK

SEQ ID NO: 22113 - protein, 6 aa, ARTIFICIAL SEQUENCE
  Synthetic Construct
KKHGEK

SEQ ID NO: 22114 - protein, 6 aa, ARTIFICIAL SEQUENCE
  Synthetic Construct
KKHGFK

SEQ ID NO: 22115 - protein, 6 aa, ARTIFICIAL SEQUENCE
  Synthetic Construct
KKHGGK

SEQ ID NO: 22116 - protein, 6 aa, ARTIFICIAL SEQUENCE
  Synthetic Construct
KKHGHK

SEQ ID NO: 22117 - protein, 6 aa, ARTIFICIAL SEQUENCE
  Synthetic Construct
KKHGIK

SEQ ID NO: 22118 - protein, 6 aa, ARTIFICIAL SEQUENCE
  Synthetic Construct
KKHGLK

SEQ ID NO: 22119 - protein, 6 aa, ARTIFICIAL SEQUENCE
  Synthetic Construct
KKHGNK

SEQ ID NO: 22120 - protein, 6 aa, ARTIFICIAL SEQUENCE
  Synthetic Construct
KKHGQK

SEQ ID NO: 22121 - protein, 6 aa, ARTIFICIAL SEQUENCE
  Synthetic Construct
KKHGRK

SEQ ID NO: 22122 - protein, 6 aa, ARTIFICIAL SEQUENCE
  Synthetic Construct
KKHGSK

SEQ ID NO: 22123 - protein, 6 aa, ARTIFICIAL SEQUENCE
  Synthetic Construct
KKHGTK

SEQ ID NO: 22124 - protein, 6 aa, ARTIFICIAL SEQUENCE
  Synthetic Construct
KKHGYK

SEQ ID NO: 22125 - protein, 6 aa, ARTIFICIAL SEQUENCE
  Synthetic Construct
KKHHAK

SEQ ID NO: 22126 - protein, 6 aa, ARTIFICIAL SEQUENCE
  Synthetic Construct
KKHHDK

SEQ ID NO: 22127 - protein, 6 aa, ARTIFICIAL SEQUENCE
  Synthetic Construct
KKHHEK

SEQ ID NO: 22128 - protein, 6 aa, ARTIFICIAL SEQUENCE
  Synthetic Construct
KKHHFK

SEQ ID NO: 22129 - protein, 6 aa, ARTIFICIAL SEQUENCE
  Synthetic Construct
KKHHGK

SEQ ID NO: 22130 - protein, 6 aa, ARTIFICIAL SEQUENCE
  Synthetic Construct
KKHHHK

SEQ ID NO: 22131 - protein, 6 aa, ARTIFICIAL SEQUENCE
  Synthetic Construct
KKHHIK

SEQ ID NO: 22132 - protein, 6 aa, ARTIFICIAL SEQUENCE
  Synthetic Construct
KKHHLK

SEQ ID NO: 22133 - protein, 6 aa, ARTIFICIAL SEQUENCE
  Synthetic Construct
KKHHNK

SEQ ID NO: 22134 - protein, 6 aa, ARTIFICIAL SEQUENCE
  Synthetic Construct
KKHHQK

SEQ ID NO: 22135 - protein, 6 aa, ARTIFICIAL SEQUENCE
  Synthetic Construct
KKHHRK

SEQ ID NO: 22136 - protein, 6 aa, ARTIFICIAL SEQUENCE
  Synthetic Construct
KKHHSK

SEQ ID NO: 22137 - protein, 6 aa, ARTIFICIAL SEQUENCE
  Synthetic Construct
KKHHTK

SEQ ID NO: 22138 - protein, 6 aa, ARTIFICIAL SEQUENCE
  Synthetic Construct
KKHHYK

SEQ ID NO: 22139 - protein, 6 aa, ARTIFICIAL SEQUENCE
  Synthetic Construct
KKHIAK

SEQ ID NO: 22140 - protein, 6 aa, ARTIFICIAL SEQUENCE
  Synthetic Construct
KKHIDK

SEQ ID NO: 22141 - protein, 6 aa, ARTIFICIAL SEQUENCE
  Synthetic Construct
KKHIEK

SEQ ID NO: 22142 - protein, 6 aa, ARTIFICIAL SEQUENCE
  Synthetic Construct
KKHIFK

SEQ ID NO: 22143 - protein, 6 aa, ARTIFICIAL SEQUENCE
  Synthetic Construct
KKHIGK

SEQ ID NO: 22144 - protein, 6 aa, ARTIFICIAL SEQUENCE
  Synthetic Construct
KKHIHK

SEQ ID NO: 22145 - protein, 6 aa, ARTIFICIAL SEQUENCE
  Synthetic Construct
KKHIIK

SEQ ID NO: 22146 - protein, 6 aa, ARTIFICIAL SEQUENCE
  Synthetic Construct
KKHILK

SEQ ID NO: 22147 - protein, 6 aa, ARTIFICIAL SEQUENCE
  Synthetic Construct
KKHINK

SEQ ID NO: 22148 - protein, 6 aa, ARTIFICIAL SEQUENCE
  Synthetic Construct
KKHIQK

SEQ ID NO: 22149 - protein, 6 aa, ARTIFICIAL SEQUENCE
  Synthetic Construct
KKHIRK

SEQ ID NO: 22150 - protein, 6 aa, ARTIFICIAL SEQUENCE
  Synthetic Construct
KKHISK

SEQ ID NO: 22151 - protein, 6 aa, ARTIFICIAL SEQUENCE
  Synthetic Construct
KKHITK

SEQ ID NO: 22152 - protein, 6 aa, ARTIFICIAL SEQUENCE
  Synthetic Construct
KKHIYK

SEQ ID NO: 22153 - protein, 6 aa, ARTIFICIAL SEQUENCE
  Synthetic Construct
KKHLAK

SEQ ID NO: 22154 - protein, 6 aa, ARTIFICIAL SEQUENCE
  Synthetic Construct
KKHLDK

SEQ ID NO: 22155 - protein, 6 aa, ARTIFICIAL SEQUENCE
  Synthetic Construct
KKHLEK

SEQ ID NO: 22156 - protein, 6 aa, ARTIFICIAL SEQUENCE
  Synthetic Construct
KKHLFK

SEQ ID NO: 22157 - protein, 6 aa, ARTIFICIAL SEQUENCE
  Synthetic Construct
KKHLGK

SEQ ID NO: 22158 - protein, 6 aa, ARTIFICIAL SEQUENCE
  Synthetic Construct
KKHLHK

SEQ ID NO: 22159 - protein, 6 aa, ARTIFICIAL SEQUENCE
  Synthetic Construct
KKHLIK

SEQ ID NO: 22160 - protein, 6 aa, ARTIFICIAL SEQUENCE
  Synthetic Construct
KKHLLK

SEQ ID NO: 22161 - protein, 6 aa, ARTIFICIAL SEQUENCE
  Synthetic Construct
KKHLNK

SEQ ID NO: 22162 - protein, 6 aa, ARTIFICIAL SEQUENCE
  Synthetic Construct
KKHLQK

SEQ ID NO: 22163 - protein, 6 aa, ARTIFICIAL SEQUENCE
  Synthetic Construct
KKHLRK

SEQ ID NO: 22164 - protein, 6 aa, ARTIFICIAL SEQUENCE
  Synthetic Construct
KKHLSK

SEQ ID NO: 22165 - protein, 6 aa, ARTIFICIAL SEQUENCE
  Synthetic Construct
KKHLTK

SEQ ID NO: 22166 - protein, 6 aa, ARTIFICIAL SEQUENCE
  Synthetic Construct
KKHLYK

SEQ ID NO: 22167 - protein, 6 aa, ARTIFICIAL SEQUENCE
  Synthetic Construct
KKHNAK

SEQ ID NO: 22168 - protein, 6 aa, ARTIFICIAL SEQUENCE
  Synthetic Construct
KKHNDK

SEQ ID NO: 22169 - protein, 6 aa, ARTIFICIAL SEQUENCE
  Synthetic Construct
KKHNEK

SEQ ID NO: 22170 - protein, 6 aa, ARTIFICIAL SEQUENCE
  Synthetic Construct
KKHNFK

SEQ ID NO: 22171 - protein, 6 aa, ARTIFICIAL SEQUENCE
  Synthetic Construct
KKHNGK

SEQ ID NO: 22172 - protein, 6 aa, ARTIFICIAL SEQUENCE
  Synthetic Construct
KKHNHK

SEQ ID NO: 22173 - protein, 6 aa, ARTIFICIAL SEQUENCE
  Synthetic Construct
KKHNIK

SEQ ID NO: 22174 - protein, 6 aa, ARTIFICIAL SEQUENCE
  Synthetic Construct
KKHNLK

SEQ ID NO: 22175 - protein, 6 aa, ARTIFICIAL SEQUENCE
  Synthetic Construct
KKHNNK

SEQ ID NO: 22176 - protein, 6 aa, ARTIFICIAL SEQUENCE
  Synthetic Construct
KKHNQK

SEQ ID NO: 22177 - protein, 6 aa, ARTIFICIAL SEQUENCE
  Synthetic Construct
KKHNRK

SEQ ID NO: 22178 - protein, 6 aa, ARTIFICIAL SEQUENCE
  Synthetic Construct
KKHNSK

SEQ ID NO: 22179 - protein, 6 aa, ARTIFICIAL SEQUENCE
  Synthetic Construct
KKHNTK

SEQ ID NO: 22180 - protein, 6 aa, ARTIFICIAL SEQUENCE
  Synthetic Construct
KKHNYK

SEQ ID NO: 22181 - protein, 6 aa, ARTIFICIAL SEQUENCE
  Synthetic Construct
KKHQAK

SEQ ID NO: 22182 - protein, 6 aa, ARTIFICIAL SEQUENCE
  Synthetic Construct
KKHQDK

SEQ ID NO: 22183 - protein, 6 aa, ARTIFICIAL SEQUENCE
  Synthetic Construct
KKHQEK

SEQ ID NO: 22184 - protein, 6 aa, ARTIFICIAL SEQUENCE
  Synthetic Construct
KKHQFK

SEQ ID NO: 22185 - protein, 6 aa, ARTIFICIAL SEQUENCE
  Synthetic Construct
KKHQGK

SEQ ID NO: 22186 - protein, 6 aa, ARTIFICIAL SEQUENCE
  Synthetic Construct
KKHQHK

SEQ ID NO: 22187 - protein, 6 aa, ARTIFICIAL SEQUENCE
  Synthetic Construct
KKHQIK

SEQ ID NO: 22188 - protein, 6 aa, ARTIFICIAL SEQUENCE
  Synthetic Construct
KKHQLK

SEQ ID NO: 22189 - protein, 6 aa, ARTIFICIAL SEQUENCE
  Synthetic Construct
KKHQNK

SEQ ID NO: 22190 - protein, 6 aa, ARTIFICIAL SEQUENCE
  Synthetic Construct
KKHQQK

SEQ ID NO: 22191 - protein, 6 aa, ARTIFICIAL SEQUENCE
  Synthetic Construct
KKHQRK

SEQ ID NO: 22192 - protein, 6 aa, ARTIFICIAL SEQUENCE
  Synthetic Construct
KKHQSK

SEQ ID NO: 22193 - protein, 6 aa, ARTIFICIAL SEQUENCE
  Synthetic Construct
KKHQTK

SEQ ID NO: 22194 - protein, 6 aa, ARTIFICIAL SEQUENCE
  Synthetic Construct
KKHQYK

SEQ ID NO: 22195 - protein, 6 aa, ARTIFICIAL SEQUENCE
  Synthetic Construct
KKHRAK

SEQ ID NO: 22196 - protein, 6 aa, ARTIFICIAL SEQUENCE
  Synthetic Construct
KKHRDK

SEQ ID NO: 22197 - protein, 6 aa, ARTIFICIAL SEQUENCE
  Synthetic Construct
KKHREK

SEQ ID NO: 22198 - protein, 6 aa, ARTIFICIAL SEQUENCE
  Synthetic Construct
KKHRFK

SEQ ID NO: 22199 - protein, 6 aa, ARTIFICIAL SEQUENCE
  Synthetic Construct
KKHRGK

SEQ ID NO: 22200 - protein, 6 aa, ARTIFICIAL SEQUENCE
  Synthetic Construct
KKHRHK

SEQ ID NO: 22201 - protein, 6 aa, ARTIFICIAL SEQUENCE
  Synthetic Construct
KKHRIK

SEQ ID NO: 22202 - protein, 6 aa, ARTIFICIAL SEQUENCE
  Synthetic Construct
KKHRLK

SEQ ID NO: 22203 - protein, 6 aa, ARTIFICIAL SEQUENCE
  Synthetic Construct
KKHRNK

SEQ ID NO: 22204 - protein, 6 aa, ARTIFICIAL SEQUENCE
  Synthetic Construct
KKHRQK

SEQ ID NO: 22205 - protein, 6 aa, ARTIFICIAL SEQUENCE
  Synthetic Construct
KKHRRK

SEQ ID NO: 22206 - protein, 6 aa, ARTIFICIAL SEQUENCE
  Synthetic Construct
KKHRSK

SEQ ID NO: 22207 - protein, 6 aa, ARTIFICIAL SEQUENCE
  Synthetic Construct
KKHRTK

SEQ ID NO: 22208 - protein, 6 aa, ARTIFICIAL SEQUENCE
  Synthetic Construct
KKHRYK

SEQ ID NO: 22209 - protein, 6 aa, ARTIFICIAL SEQUENCE
  Synthetic Construct
KKHSAK

SEQ ID NO: 22210 - protein, 6 aa, ARTIFICIAL SEQUENCE
  Synthetic Construct
KKHSDK

SEQ ID NO: 22211 - protein, 6 aa, ARTIFICIAL SEQUENCE
  Synthetic Construct
KKHSEK

SEQ ID NO: 22212 - protein, 6 aa, ARTIFICIAL SEQUENCE
  Synthetic Construct
KKHSFK

SEQ ID NO: 22213 - protein, 6 aa, ARTIFICIAL SEQUENCE
  Synthetic Construct
KKHSGK

SEQ ID NO: 22214 - protein, 6 aa, ARTIFICIAL SEQUENCE
  Synthetic Construct
KKHSHK

SEQ ID NO: 22215 - protein, 6 aa, ARTIFICIAL SEQUENCE
  Synthetic Construct
KKHSIK

SEQ ID NO: 22216 - protein, 6 aa, ARTIFICIAL SEQUENCE
  Synthetic Construct
KKHSLK

SEQ ID NO: 22217 - protein, 6 aa, ARTIFICIAL SEQUENCE
  Synthetic Construct
KKHSNK

SEQ ID NO: 22218 - protein, 6 aa, ARTIFICIAL SEQUENCE
  Synthetic Construct
KKHSQK

SEQ ID NO: 22219 - protein, 6 aa, ARTIFICIAL SEQUENCE
  Synthetic Construct
KKHSRK

SEQ ID NO: 22220 - protein, 6 aa, ARTIFICIAL SEQUENCE
  Synthetic Construct
KKHSSK

SEQ ID NO: 22221 - protein, 6 aa, ARTIFICIAL SEQUENCE
  Synthetic Construct
KKHSTK

SEQ ID NO: 22222 - protein, 6 aa, ARTIFICIAL SEQUENCE
  Synthetic Construct
KKHSYK

SEQ ID NO: 22223 - protein, 6 aa, ARTIFICIAL SEQUENCE
  Synthetic Construct
KKHTAK

SEQ ID NO: 22224 - protein, 6 aa, ARTIFICIAL SEQUENCE
  Synthetic Construct
KKHTDK

SEQ ID NO: 22225 - protein, 6 aa, ARTIFICIAL SEQUENCE
  Synthetic Construct
KKHTEK

SEQ ID NO: 22226 - protein, 6 aa, ARTIFICIAL SEQUENCE
  Synthetic Construct
KKHTFK

SEQ ID NO: 22227 - protein, 6 aa, ARTIFICIAL SEQUENCE
  Synthetic Construct
KKHTGK

SEQ ID NO: 22228 - protein, 6 aa, ARTIFICIAL SEQUENCE
  Synthetic Construct
KKHTHK

SEQ ID NO: 22229 - protein, 6 aa, ARTIFICIAL SEQUENCE
  Synthetic Construct
KKHTIK

SEQ ID NO: 22230 - protein, 6 aa, ARTIFICIAL SEQUENCE
  Synthetic Construct
KKHTLK

SEQ ID NO: 22231 - protein, 6 aa, ARTIFICIAL SEQUENCE
  Synthetic Construct
KKHTNK

SEQ ID NO: 22232 - protein, 6 aa, ARTIFICIAL SEQUENCE
  Synthetic Construct
KKHTQK

SEQ ID NO: 22233 - protein, 6 aa, ARTIFICIAL SEQUENCE
  Synthetic Construct
KKHTRK

SEQ ID NO: 22234 - protein, 6 aa, ARTIFICIAL SEQUENCE
  Synthetic Construct
KKHTSK

SEQ ID NO: 22235 - protein, 6 aa, ARTIFICIAL SEQUENCE
  Synthetic Construct
KKHTTK

SEQ ID NO: 22236 - protein, 6 aa, ARTIFICIAL SEQUENCE
  Synthetic Construct
KKHTYK

SEQ ID NO: 22237 - protein, 6 aa, ARTIFICIAL SEQUENCE
  Synthetic Construct
KKHYAK

SEQ ID NO: 22238 - protein, 6 aa, ARTIFICIAL SEQUENCE
  Synthetic Construct
KKHYDK

SEQ ID NO: 22239 - protein, 6 aa, ARTIFICIAL SEQUENCE
  Synthetic Construct
KKHYEK

SEQ ID NO: 22240 - protein, 6 aa, ARTIFICIAL SEQUENCE
  Synthetic Construct
KKHYFK

SEQ ID NO: 22241 - protein, 6 aa, ARTIFICIAL SEQUENCE
  Synthetic Construct
KKHYGK

SEQ ID NO: 22242 - protein, 6 aa, ARTIFICIAL SEQUENCE
  Synthetic Construct
KKHYHK

SEQ ID NO: 22243 - protein, 6 aa, ARTIFICIAL SEQUENCE
  Synthetic Construct
KKHYIK

SEQ ID NO: 22244 - protein, 6 aa, ARTIFICIAL SEQUENCE
  Synthetic Construct
KKHYLK

SEQ ID NO: 22245 - protein, 6 aa, ARTIFICIAL SEQUENCE
  Synthetic Construct
KKHYNK

SEQ ID NO: 22246 - protein, 6 aa, ARTIFICIAL SEQUENCE
  Synthetic Construct
KKHYQK

SEQ ID NO: 22247 - protein, 6 aa, ARTIFICIAL SEQUENCE
  Synthetic Construct
KKHYRK

SEQ ID NO: 22248 - protein, 6 aa, ARTIFICIAL SEQUENCE
  Synthetic Construct
KKHYSK

SEQ ID NO: 22249 - protein, 6 aa, ARTIFICIAL SEQUENCE
  Synthetic Construct
KKHYTK

SEQ ID NO: 22250 - protein, 6 aa, ARTIFICIAL SEQUENCE
  Synthetic Construct
KKHYYK

SEQ ID NO: 22251 - protein, 6 aa, ARTIFICIAL SEQUENCE
  Synthetic Construct
KKIAAK

SEQ ID NO: 22252 - protein, 6 aa, ARTIFICIAL SEQUENCE
  Synthetic Construct
KKIADK

SEQ ID NO: 22253 - protein, 6 aa, ARTIFICIAL SEQUENCE
  Synthetic Construct
KKIAEK

SEQ ID NO: 22254 - protein, 6 aa, ARTIFICIAL SEQUENCE
  Synthetic Construct
KKIAFK

SEQ ID NO: 22255 - protein, 6 aa, ARTIFICIAL SEQUENCE
  Synthetic Construct
KKIAGK

SEQ ID NO: 22256 - protein, 6 aa, ARTIFICIAL SEQUENCE
  Synthetic Construct
KKIAHK

SEQ ID NO: 22257 - protein, 6 aa, ARTIFICIAL SEQUENCE
  Synthetic Construct
KKIAIK

SEQ ID NO: 22258 - protein, 6 aa, ARTIFICIAL SEQUENCE
  Synthetic Construct
KKIALK

SEQ ID NO: 22259 - protein, 6 aa, ARTIFICIAL SEQUENCE
  Synthetic Construct
KKIANK

SEQ ID NO: 22260 - protein, 6 aa, ARTIFICIAL SEQUENCE
  Synthetic Construct
KKIAQK

SEQ ID NO: 22261 - protein, 6 aa, ARTIFICIAL SEQUENCE
  Synthetic Construct
KKIARK

SEQ ID NO: 22262 - protein, 6 aa, ARTIFICIAL SEQUENCE
  Synthetic Construct
KKIASK

SEQ ID NO: 22263 - protein, 6 aa, ARTIFICIAL SEQUENCE
  Synthetic Construct
KKIATK

SEQ ID NO: 22264 - protein, 6 aa, ARTIFICIAL SEQUENCE
  Synthetic Construct
KKIAYK

SEQ ID NO: 22265 - protein, 6 aa, ARTIFICIAL SEQUENCE
  Synthetic Construct
KKIDAK

SEQ ID NO: 22266 - protein, 6 aa, ARTIFICIAL SEQUENCE
  Synthetic Construct
KKIDDK

SEQ ID NO: 22267 - protein, 6 aa, ARTIFICIAL SEQUENCE
  Synthetic Construct
KKIDEK

SEQ ID NO: 22268 - protein, 6 aa, ARTIFICIAL SEQUENCE
  Synthetic Construct
KKIDFK

SEQ ID NO: 22269 - protein, 6 aa, ARTIFICIAL SEQUENCE
  Synthetic Construct
KKIDGK

SEQ ID NO: 22270 - protein, 6 aa, ARTIFICIAL SEQUENCE
  Synthetic Construct
KKIDHK

SEQ ID NO: 22271 - protein, 6 aa, ARTIFICIAL SEQUENCE
  Synthetic Construct
KKIDIK

SEQ ID NO: 22272 - protein, 6 aa, ARTIFICIAL SEQUENCE
  Synthetic Construct
KKIDLK

SEQ ID NO: 22273 - protein, 6 aa, ARTIFICIAL SEQUENCE
  Synthetic Construct
KKIDNK

SEQ ID NO: 22274 - protein, 6 aa, ARTIFICIAL SEQUENCE
  Synthetic Construct
KKIDQK

SEQ ID NO: 22275 - protein, 6 aa, ARTIFICIAL SEQUENCE
  Synthetic Construct
KKIDRK

SEQ ID NO: 22276 - protein, 6 aa, ARTIFICIAL SEQUENCE
  Synthetic Construct
KKIDSK

SEQ ID NO: 22277 - protein, 6 aa, ARTIFICIAL SEQUENCE
  Synthetic Construct
KKIDTK

SEQ ID NO: 22278 - protein, 6 aa, ARTIFICIAL SEQUENCE
  Synthetic Construct
KKIDYK

SEQ ID NO: 22279 - protein, 6 aa, ARTIFICIAL SEQUENCE
  Synthetic Construct
KKIEAK

SEQ ID NO: 22280 - protein, 6 aa, ARTIFICIAL SEQUENCE
  Synthetic Construct
KKIEDK

SEQ ID NO: 22281 - protein, 6 aa, ARTIFICIAL SEQUENCE
  Synthetic Construct
KKIEEK

SEQ ID NO: 22282 - protein, 6 aa, ARTIFICIAL SEQUENCE
  Synthetic Construct
KKIEFK

SEQ ID NO: 22283 - protein, 6 aa, ARTIFICIAL SEQUENCE
  Synthetic Construct
KKIEGK

SEQ ID NO: 22284 - protein, 6 aa, ARTIFICIAL SEQUENCE
  Synthetic Construct
KKIEHK

SEQ ID NO: 22285 - protein, 6 aa, ARTIFICIAL SEQUENCE
  Synthetic Construct
KKIEIK

SEQ ID NO: 22286 - protein, 6 aa, ARTIFICIAL SEQUENCE
  Synthetic Construct
KKIELK

SEQ ID NO: 22287 - protein, 6 aa, ARTIFICIAL SEQUENCE
  Synthetic Construct
KKIENK

SEQ ID NO: 22288 - protein, 6 aa, ARTIFICIAL SEQUENCE
  Synthetic Construct
KKIEQK

SEQ ID NO: 22289 - protein, 6 aa, ARTIFICIAL SEQUENCE
  Synthetic Construct
KKIERK

SEQ ID NO: 22290 - protein, 6 aa, ARTIFICIAL SEQUENCE
  Synthetic Construct
KKIESK

SEQ ID NO: 22291 - protein, 6 aa, ARTIFICIAL SEQUENCE
  Synthetic Construct
KKIETK

SEQ ID NO: 22292 - protein, 6 aa, ARTIFICIAL SEQUENCE
  Synthetic Construct
KKIEYK

SEQ ID NO: 22293 - protein, 6 aa, ARTIFICIAL SEQUENCE
  Synthetic Construct
KKIFAK

SEQ ID NO: 22294 - protein, 6 aa, ARTIFICIAL SEQUENCE
  Synthetic Construct
KKIFDK

SEQ ID NO: 22295 - protein, 6 aa, ARTIFICIAL SEQUENCE
  Synthetic Construct
KKIFEK

SEQ ID NO: 22296 - protein, 6 aa, ARTIFICIAL SEQUENCE
  Synthetic Construct
KKIFFK

SEQ ID NO: 22297 - protein, 6 aa, ARTIFICIAL SEQUENCE
  Synthetic Construct
KKIFGK

SEQ ID NO: 22298 - protein, 6 aa, ARTIFICIAL SEQUENCE
  Synthetic Construct
KKIFHK

SEQ ID NO: 22299 - protein, 6 aa, ARTIFICIAL SEQUENCE
  Synthetic Construct
KKIFIK

SEQ ID NO: 22300 - protein, 6 aa, ARTIFICIAL SEQUENCE
  Synthetic Construct
KKIFLK

SEQ ID NO: 22301 - protein, 6 aa, ARTIFICIAL SEQUENCE
  Synthetic Construct
KKIFNK

SEQ ID NO: 22302 - protein, 6 aa, ARTIFICIAL SEQUENCE
  Synthetic Construct
KKIFQK

SEQ ID NO: 22303 - protein, 6 aa, ARTIFICIAL SEQUENCE
  Synthetic Construct
KKIFRK

SEQ ID NO: 22304 - protein, 6 aa, ARTIFICIAL SEQUENCE
  Synthetic Construct
KKIFSK

SEQ ID NO: 22305 - protein, 6 aa, ARTIFICIAL SEQUENCE
  Synthetic Construct
KKIFTK

SEQ ID NO: 22306 - protein, 6 aa, ARTIFICIAL SEQUENCE
  Synthetic Construct
KKIFYK

SEQ ID NO: 22307 - protein, 6 aa, ARTIFICIAL SEQUENCE
  Synthetic Construct
KKIGAK

SEQ ID NO: 22308 - protein, 6 aa, ARTIFICIAL SEQUENCE
  Synthetic Construct
KKIGDK

SEQ ID NO: 22309 - protein, 6 aa, ARTIFICIAL SEQUENCE
  Synthetic Construct
KKIGEK

SEQ ID NO: 22310 - protein, 6 aa, ARTIFICIAL SEQUENCE
  Synthetic Construct
KKIGFK

SEQ ID NO: 22311 - protein, 6 aa, ARTIFICIAL SEQUENCE
  Synthetic Construct
KKIGGK

SEQ ID NO: 22312 - protein, 6 aa, ARTIFICIAL SEQUENCE
  Synthetic Construct
KKIGHK

SEQ ID NO: 22313 - protein, 6 aa, ARTIFICIAL SEQUENCE
  Synthetic Construct
KKIGIK

SEQ ID NO: 22314 - protein, 6 aa, ARTIFICIAL SEQUENCE
  Synthetic Construct
KKIGLK

SEQ ID NO: 22315 - protein, 6 aa, ARTIFICIAL SEQUENCE
  Synthetic Construct
KKIGNK

SEQ ID NO: 22316 - protein, 6 aa, ARTIFICIAL SEQUENCE
  Synthetic Construct
KKIGQK

SEQ ID NO: 22317 - protein, 6 aa, ARTIFICIAL SEQUENCE
  Synthetic Construct
KKIGRK

SEQ ID NO: 22318 - protein, 6 aa, ARTIFICIAL SEQUENCE
  Synthetic Construct
KKIGSK

SEQ ID NO: 22319 - protein, 6 aa, ARTIFICIAL SEQUENCE
  Synthetic Construct
KKIGTK

SEQ ID NO: 22320 - protein, 6 aa, ARTIFICIAL SEQUENCE
  Synthetic Construct
KKIGYK

SEQ ID NO: 22321 - protein, 6 aa, ARTIFICIAL SEQUENCE
  Synthetic Construct
KKIHAK

SEQ ID NO: 22322 - protein, 6 aa, ARTIFICIAL SEQUENCE
  Synthetic Construct
KKIHDK

SEQ ID NO: 22323 - protein, 6 aa, ARTIFICIAL SEQUENCE
  Synthetic Construct
KKIHEK

SEQ ID NO: 22324 - protein, 6 aa, ARTIFICIAL SEQUENCE
  Synthetic Construct
KKIHFK

SEQ ID NO: 22325 - protein, 6 aa, ARTIFICIAL SEQUENCE
  Synthetic Construct
KKIHGK

SEQ ID NO: 22326 - protein, 6 aa, ARTIFICIAL SEQUENCE
  Synthetic Construct
KKIHHK

SEQ ID NO: 22327 - protein, 6 aa, ARTIFICIAL SEQUENCE
  Synthetic Construct
KKIHIK

SEQ ID NO: 22328 - protein, 6 aa, ARTIFICIAL SEQUENCE
  Synthetic Construct
KKIHLK

SEQ ID NO: 22329 - protein, 6 aa, ARTIFICIAL SEQUENCE
  Synthetic Construct
KKIHNK

SEQ ID NO: 22330 - protein, 6 aa, ARTIFICIAL SEQUENCE
  Synthetic Construct
KKIHQK

SEQ ID NO: 22331 - protein, 6 aa, ARTIFICIAL SEQUENCE
  Synthetic Construct
KKIHRK

SEQ ID NO: 22332 - protein, 6 aa, ARTIFICIAL SEQUENCE
  Synthetic Construct
KKIHSK

SEQ ID NO: 22333 - protein, 6 aa, ARTIFICIAL SEQUENCE
  Synthetic Construct
KKIHTK

SEQ ID NO: 22334 - protein, 6 aa, ARTIFICIAL SEQUENCE
  Synthetic Construct
KKIHYK

SEQ ID NO: 22335 - protein, 6 aa, ARTIFICIAL SEQUENCE
  Synthetic Construct
KKIIAK

SEQ ID NO: 22336 - protein, 6 aa, ARTIFICIAL SEQUENCE
  Synthetic Construct
KKIIDK

SEQ ID NO: 22337 - protein, 6 aa, ARTIFICIAL SEQUENCE
  Synthetic Construct
KKIIEK

SEQ ID NO: 22338 - protein, 6 aa, ARTIFICIAL SEQUENCE
  Synthetic Construct
KKIIFK

SEQ ID NO: 22339 - protein, 6 aa, ARTIFICIAL SEQUENCE
  Synthetic Construct
KKIIGK

SEQ ID NO: 22340 - protein, 6 aa, ARTIFICIAL SEQUENCE
  Synthetic Construct
KKIIHK

SEQ ID NO: 22341 - protein, 6 aa, ARTIFICIAL SEQUENCE
  Synthetic Construct
KKIIIK

SEQ ID NO: 22342 - protein, 6 aa, ARTIFICIAL SEQUENCE
  Synthetic Construct
KKIILK

SEQ ID NO: 22343 - protein, 6 aa, ARTIFICIAL SEQUENCE
  Synthetic Construct
KKIINK

SEQ ID NO: 22344 - protein, 6 aa, ARTIFICIAL SEQUENCE
  Synthetic Construct
KKIIQK

SEQ ID NO: 22345 - protein, 6 aa, ARTIFICIAL SEQUENCE
  Synthetic Construct
KKIIRK

SEQ ID NO: 22346 - protein, 6 aa, ARTIFICIAL SEQUENCE
  Synthetic Construct
KKIISK

SEQ ID NO: 22347 - protein, 6 aa, ARTIFICIAL SEQUENCE
  Synthetic Construct
KKIITK

SEQ ID NO: 22348 - protein, 6 aa, ARTIFICIAL SEQUENCE
  Synthetic Construct
KKIIYK

SEQ ID NO: 22349 - protein, 6 aa, ARTIFICIAL SEQUENCE
  Synthetic Construct
KKILAK

SEQ ID NO: 22350 - protein, 6 aa, ARTIFICIAL SEQUENCE
  Synthetic Construct
KKILDK

SEQ ID NO: 22351 - protein, 6 aa, ARTIFICIAL SEQUENCE
  Synthetic Construct
KKILEK

SEQ ID NO: 22352 - protein, 6 aa, ARTIFICIAL SEQUENCE
  Synthetic Construct
KKILFK

SEQ ID NO: 22353 - protein, 6 aa, ARTIFICIAL SEQUENCE
  Synthetic Construct
KKILGK

SEQ ID NO: 22354 - protein, 6 aa, ARTIFICIAL SEQUENCE
  Synthetic Construct
KKILHK

SEQ ID NO: 22355 - protein, 6 aa, ARTIFICIAL SEQUENCE
  Synthetic Construct
KKILIK

SEQ ID NO: 22356 - protein, 6 aa, ARTIFICIAL SEQUENCE
  Synthetic Construct
KKILLK

SEQ ID NO: 22357 - protein, 6 aa, ARTIFICIAL SEQUENCE
  Synthetic Construct
KKILNK

SEQ ID NO: 22358 - protein, 6 aa, ARTIFICIAL SEQUENCE
  Synthetic Construct
KKILQK

SEQ ID NO: 22359 - protein, 6 aa, ARTIFICIAL SEQUENCE
  Synthetic Construct
KKILRK

SEQ ID NO: 22360 - protein, 6 aa, ARTIFICIAL SEQUENCE
  Synthetic Construct
KKILSK

SEQ ID NO: 22361 - protein, 6 aa, ARTIFICIAL SEQUENCE
  Synthetic Construct
KKILTK

SEQ ID NO: 22362 - protein, 6 aa, ARTIFICIAL SEQUENCE
  Synthetic Construct
KKILYK

SEQ ID NO: 22363 - protein, 6 aa, ARTIFICIAL SEQUENCE
  Synthetic Construct
KKINAK

SEQ ID NO: 22364 - protein, 6 aa, ARTIFICIAL SEQUENCE
  Synthetic Construct
KKINDK

SEQ ID NO: 22365 - protein, 6 aa, ARTIFICIAL SEQUENCE
  Synthetic Construct
KKINEK

SEQ ID NO: 22366 - protein, 6 aa, ARTIFICIAL SEQUENCE
  Synthetic Construct
KKINFK

SEQ ID NO: 22367 - protein, 6 aa, ARTIFICIAL SEQUENCE
  Synthetic Construct
KKINGK

SEQ ID NO: 22368 - protein, 6 aa, ARTIFICIAL SEQUENCE
  Synthetic Construct
KKINHK

SEQ ID NO: 22369 - protein, 6 aa, ARTIFICIAL SEQUENCE
  Synthetic Construct
KKINIK

SEQ ID NO: 22370 - protein, 6 aa, ARTIFICIAL SEQUENCE
  Synthetic Construct
KKINLK

SEQ ID NO: 22371 - protein, 6 aa, ARTIFICIAL SEQUENCE
  Synthetic Construct
KKINNK

SEQ ID NO: 22372 - protein, 6 aa, ARTIFICIAL SEQUENCE
  Synthetic Construct
KKINQK

SEQ ID NO: 22373 - protein, 6 aa, ARTIFICIAL SEQUENCE
  Synthetic Construct
KKINRK

SEQ ID NO: 22374 - protein, 6 aa, ARTIFICIAL SEQUENCE
  Synthetic Construct
KKINSK

SEQ ID NO: 22375 - protein, 6 aa, ARTIFICIAL SEQUENCE
  Synthetic Construct
KKINTK

SEQ ID NO: 22376 - protein, 6 aa, ARTIFICIAL SEQUENCE
  Synthetic Construct
KKINYK

SEQ ID NO: 22377 - protein, 6 aa, ARTIFICIAL SEQUENCE
  Synthetic Construct
KKIQAK

SEQ ID NO: 22378 - protein, 6 aa, ARTIFICIAL SEQUENCE
  Synthetic Construct
KKIQDK

SEQ ID NO: 22379 - protein, 6 aa, ARTIFICIAL SEQUENCE
  Synthetic Construct
KKIQEK

SEQ ID NO: 22380 - protein, 6 aa, ARTIFICIAL SEQUENCE
  Synthetic Construct
KKIQFK

SEQ ID NO: 22381 - protein, 6 aa, ARTIFICIAL SEQUENCE
  Synthetic Construct
KKIQGK

SEQ ID NO: 22382 - protein, 6 aa, ARTIFICIAL SEQUENCE
  Synthetic Construct
KKIQHK

SEQ ID NO: 22383 - protein, 6 aa, ARTIFICIAL SEQUENCE
  Synthetic Construct
KKIQIK

SEQ ID NO: 22384 - protein, 6 aa, ARTIFICIAL SEQUENCE
  Synthetic Construct
KKIQLK

SEQ ID NO: 22385 - protein, 6 aa, ARTIFICIAL SEQUENCE
  Synthetic Construct
KKIQNK

SEQ ID NO: 22386 - protein, 6 aa, ARTIFICIAL SEQUENCE
  Synthetic Construct
KKIQQK

SEQ ID NO: 22387 - protein, 6 aa, ARTIFICIAL SEQUENCE
  Synthetic Construct
KKIQRK

SEQ ID NO: 22388 - protein, 6 aa, ARTIFICIAL SEQUENCE
  Synthetic Construct
KKIQSK

SEQ ID NO: 22389 - protein, 6 aa, ARTIFICIAL SEQUENCE
  Synthetic Construct
KKIQTK

SEQ ID NO: 22390 - protein, 6 aa, ARTIFICIAL SEQUENCE
  Synthetic Construct
KKIQYK

SEQ ID NO: 22391 - protein, 6 aa, ARTIFICIAL SEQUENCE
  Synthetic Construct
KKIRAK

SEQ ID NO: 22392 - protein, 6 aa, ARTIFICIAL SEQUENCE
  Synthetic Construct
KKIRDK

SEQ ID NO: 22393 - protein, 6 aa, ARTIFICIAL SEQUENCE
  Synthetic Construct
KKIREK

SEQ ID NO: 22394 - protein, 6 aa, ARTIFICIAL SEQUENCE
  Synthetic Construct
KKIRFK

SEQ ID NO: 22395 - protein, 6 aa, ARTIFICIAL SEQUENCE
  Synthetic Construct
KKIRGK

SEQ ID NO: 22396 - protein, 6 aa, ARTIFICIAL SEQUENCE
  Synthetic Construct
KKIRHK

SEQ ID NO: 22397 - protein, 6 aa, ARTIFICIAL SEQUENCE
  Synthetic Construct
KKIRIK

SEQ ID NO: 22398 - protein, 6 aa, ARTIFICIAL SEQUENCE
  Synthetic Construct
KKIRLK

SEQ ID NO: 22399 - protein, 6 aa, ARTIFICIAL SEQUENCE
  Synthetic Construct
KKIRNK

SEQ ID NO: 22400 - protein, 6 aa, ARTIFICIAL SEQUENCE
  Synthetic Construct
KKIRQK

SEQ ID NO: 22401 - protein, 6 aa, ARTIFICIAL SEQUENCE
  Synthetic Construct
KKIRRK

SEQ ID NO: 22402 - protein, 6 aa, ARTIFICIAL SEQUENCE
  Synthetic Construct
KKIRSK

SEQ ID NO: 22403 - protein, 6 aa, ARTIFICIAL SEQUENCE
  Synthetic Construct
KKIRTK

SEQ ID NO: 22404 - protein, 6 aa, ARTIFICIAL SEQUENCE
  Synthetic Construct
KKIRYK

SEQ ID NO: 22405 - protein, 6 aa, ARTIFICIAL SEQUENCE
  Synthetic Construct
KKISAK

SEQ ID NO: 22406 - protein, 6 aa, ARTIFICIAL SEQUENCE
  Synthetic Construct
KKISDK

SEQ ID NO: 22407 - protein, 6 aa, ARTIFICIAL SEQUENCE
  Synthetic Construct
KKISEK

SEQ ID NO: 22408 - protein, 6 aa, ARTIFICIAL SEQUENCE
  Synthetic Construct
KKISFK

SEQ ID NO: 22409 - protein, 6 aa, ARTIFICIAL SEQUENCE
  Synthetic Construct
KKISGK

SEQ ID NO: 22410 - protein, 6 aa, ARTIFICIAL SEQUENCE
  Synthetic Construct
KKISHK

SEQ ID NO: 22411 - protein, 6 aa, ARTIFICIAL SEQUENCE
  Synthetic Construct
KKISIK

SEQ ID NO: 22412 - protein, 6 aa, ARTIFICIAL SEQUENCE
  Synthetic Construct
KKISLK

SEQ ID NO: 22413 - protein, 6 aa, ARTIFICIAL SEQUENCE
  Synthetic Construct
KKISNK

SEQ ID NO: 22414 - protein, 6 aa, ARTIFICIAL SEQUENCE
  Synthetic Construct
KKISQK

SEQ ID NO: 22415 - protein, 6 aa, ARTIFICIAL SEQUENCE
  Synthetic Construct
KKISRK

SEQ ID NO: 22416 - protein, 6 aa, ARTIFICIAL SEQUENCE
  Synthetic Construct
KKISSK

SEQ ID NO: 22417 - protein, 6 aa, ARTIFICIAL SEQUENCE
  Synthetic Construct
KKISTK

SEQ ID NO: 22418 - protein, 6 aa, ARTIFICIAL SEQUENCE
  Synthetic Construct
KKISYK

SEQ ID NO: 22419 - protein, 6 aa, ARTIFICIAL SEQUENCE
  Synthetic Construct
KKITAK

SEQ ID NO: 22420 - protein, 6 aa, ARTIFICIAL SEQUENCE
  Synthetic Construct
KKITDK

SEQ ID NO: 22421 - protein, 6 aa, ARTIFICIAL SEQUENCE
  Synthetic Construct
KKITEK

SEQ ID NO: 22422 - protein, 6 aa, ARTIFICIAL SEQUENCE
  Synthetic Construct
KKITFK

SEQ ID NO: 22423 - protein, 6 aa, ARTIFICIAL SEQUENCE
  Synthetic Construct
KKITGK

SEQ ID NO: 22424 - protein, 6 aa, ARTIFICIAL SEQUENCE
  Synthetic Construct
KKITHK

SEQ ID NO: 22425 - protein, 6 aa, ARTIFICIAL SEQUENCE
  Synthetic Construct
KKITIK

SEQ ID NO: 22426 - protein, 6 aa, ARTIFICIAL SEQUENCE
  Synthetic Construct
KKITLK

SEQ ID NO: 22427 - protein, 6 aa, ARTIFICIAL SEQUENCE
  Synthetic Construct
KKITNK

SEQ ID NO: 22428 - protein, 6 aa, ARTIFICIAL SEQUENCE
  Synthetic Construct
KKITQK

SEQ ID NO: 22429 - protein, 6 aa, ARTIFICIAL SEQUENCE
  Synthetic Construct
KKITRK

SEQ ID NO: 22430 - protein, 6 aa, ARTIFICIAL SEQUENCE
  Synthetic Construct
KKITSK

SEQ ID NO: 22431 - protein, 6 aa, ARTIFICIAL SEQUENCE
  Synthetic Construct
KKITTK

SEQ ID NO: 22432 - protein, 6 aa, ARTIFICIAL SEQUENCE
  Synthetic Construct
KKITYK

SEQ ID NO: 22433 - protein, 6 aa, ARTIFICIAL SEQUENCE
  Synthetic Construct
KKIYAK

SEQ ID NO: 22434 - protein, 6 aa, ARTIFICIAL SEQUENCE
  Synthetic Construct
KKIYDK

SEQ ID NO: 22435 - protein, 6 aa, ARTIFICIAL SEQUENCE
  Synthetic Construct
KKIYEK

SEQ ID NO: 22436 - protein, 6 aa, ARTIFICIAL SEQUENCE
  Synthetic Construct
KKIYFK

SEQ ID NO: 22437 - protein, 6 aa, ARTIFICIAL SEQUENCE
  Synthetic Construct
KKIYGK

SEQ ID NO: 22438 - protein, 6 aa, ARTIFICIAL SEQUENCE
  Synthetic Construct
KKIYHK

SEQ ID NO: 22439 - protein, 6 aa, ARTIFICIAL SEQUENCE
  Synthetic Construct
KKIYIK

SEQ ID NO: 22440 - protein, 6 aa, ARTIFICIAL SEQUENCE
  Synthetic Construct
KKIYLK

SEQ ID NO: 22441 - protein, 6 aa, ARTIFICIAL SEQUENCE
  Synthetic Construct
KKIYNK

SEQ ID NO: 22442 - protein, 6 aa, ARTIFICIAL SEQUENCE
  Synthetic Construct
KKIYQK

SEQ ID NO: 22443 - protein, 6 aa, ARTIFICIAL SEQUENCE
  Synthetic Construct
KKIYRK

SEQ ID NO: 22444 - protein, 6 aa, ARTIFICIAL SEQUENCE
  Synthetic Construct
KKIYSK

SEQ ID NO: 22445 - protein, 6 aa, ARTIFICIAL SEQUENCE
  Synthetic Construct
KKIYTK

SEQ ID NO: 22446 - protein, 6 aa, ARTIFICIAL SEQUENCE
  Synthetic Construct
KKIYYK

SEQ ID NO: 22447 - protein, 6 aa, ARTIFICIAL SEQUENCE
  Synthetic Construct
KKLAAK

SEQ ID NO: 22448 - protein, 6 aa, ARTIFICIAL SEQUENCE
  Synthetic Construct
KKLADK

SEQ ID NO: 22449 - protein, 6 aa, ARTIFICIAL SEQUENCE
  Synthetic Construct
KKLAEK

SEQ ID NO: 22450 - protein, 6 aa, ARTIFICIAL SEQUENCE
  Synthetic Construct
KKLAFK

SEQ ID NO: 22451 - protein, 6 aa, ARTIFICIAL SEQUENCE
  Synthetic Construct
KKLAGK

SEQ ID NO: 22452 - protein, 6 aa, ARTIFICIAL SEQUENCE
  Synthetic Construct
KKLAHK

SEQ ID NO: 22453 - protein, 6 aa, ARTIFICIAL SEQUENCE
  Synthetic Construct
KKLAIK

SEQ ID NO: 22454 - protein, 6 aa, ARTIFICIAL SEQUENCE
  Synthetic Construct
KKLALK

SEQ ID NO: 22455 - protein, 6 aa, ARTIFICIAL SEQUENCE
  Synthetic Construct
KKLANK

SEQ ID NO: 22456 - protein, 6 aa, ARTIFICIAL SEQUENCE
  Synthetic Construct
KKLAQK

SEQ ID NO: 22457 - protein, 6 aa, ARTIFICIAL SEQUENCE
  Synthetic Construct
KKLARK

SEQ ID NO: 22458 - protein, 6 aa, ARTIFICIAL SEQUENCE
  Synthetic Construct
KKLASK

SEQ ID NO: 22459 - protein, 6 aa, ARTIFICIAL SEQUENCE
  Synthetic Construct
KKLATK

SEQ ID NO: 22460 - protein, 6 aa, ARTIFICIAL SEQUENCE
  Synthetic Construct
KKLAYK

SEQ ID NO: 22461 - protein, 6 aa, ARTIFICIAL SEQUENCE
  Synthetic Construct
KKLDAK

SEQ ID NO: 22462 - protein, 6 aa, ARTIFICIAL SEQUENCE
  Synthetic Construct
KKLDDK

SEQ ID NO: 22463 - protein, 6 aa, ARTIFICIAL SEQUENCE
  Synthetic Construct
KKLDEK

SEQ ID NO: 22464 - protein, 6 aa, ARTIFICIAL SEQUENCE
  Synthetic Construct
KKLDFK

SEQ ID NO: 22465 - protein, 6 aa, ARTIFICIAL SEQUENCE
  Synthetic Construct
KKLDGK

SEQ ID NO: 22466 - protein, 6 aa, ARTIFICIAL SEQUENCE
  Synthetic Construct
KKLDHK

SEQ ID NO: 22467 - protein, 6 aa, ARTIFICIAL SEQUENCE
  Synthetic Construct
KKLDIK

SEQ ID NO: 22468 - protein, 6 aa, ARTIFICIAL SEQUENCE
  Synthetic Construct
KKLDLK

SEQ ID NO: 22469 - protein, 6 aa, ARTIFICIAL SEQUENCE
  Synthetic Construct
KKLDNK

SEQ ID NO: 22470 - protein, 6 aa, ARTIFICIAL SEQUENCE
  Synthetic Construct
KKLDQK

SEQ ID NO: 22471 - protein, 6 aa, ARTIFICIAL SEQUENCE
  Synthetic Construct
KKLDRK

SEQ ID NO: 22472 - protein, 6 aa, ARTIFICIAL SEQUENCE
  Synthetic Construct
KKLDSK

SEQ ID NO: 22473 - protein, 6 aa, ARTIFICIAL SEQUENCE
  Synthetic Construct
KKLDTK

SEQ ID NO: 22474 - protein, 6 aa, ARTIFICIAL SEQUENCE
  Synthetic Construct
KKLDYK

SEQ ID NO: 22475 - protein, 6 aa, ARTIFICIAL SEQUENCE
  Synthetic Construct
KKLEAK

SEQ ID NO: 22476 - protein, 6 aa, ARTIFICIAL SEQUENCE
  Synthetic Construct
KKLEDK

SEQ ID NO: 22477 - protein, 6 aa, ARTIFICIAL SEQUENCE
  Synthetic Construct
KKLEEK

SEQ ID NO: 22478 - protein, 6 aa, ARTIFICIAL SEQUENCE
  Synthetic Construct
KKLEFK

SEQ ID NO: 22479 - protein, 6 aa, ARTIFICIAL SEQUENCE
  Synthetic Construct
KKLEGK

SEQ ID NO: 22480 - protein, 6 aa, ARTIFICIAL SEQUENCE
  Synthetic Construct
KKLEHK

SEQ ID NO: 22481 - protein, 6 aa, ARTIFICIAL SEQUENCE
  Synthetic Construct
KKLEIK

SEQ ID NO: 22482 - protein, 6 aa, ARTIFICIAL SEQUENCE
  Synthetic Construct
KKLELK

SEQ ID NO: 22483 - protein, 6 aa, ARTIFICIAL SEQUENCE
  Synthetic Construct
KKLENK

SEQ ID NO: 22484 - protein, 6 aa, ARTIFICIAL SEQUENCE
  Synthetic Construct
KKLEQK

SEQ ID NO: 22485 - protein, 6 aa, ARTIFICIAL SEQUENCE
  Synthetic Construct
KKLERK

SEQ ID NO: 22486 - protein, 6 aa, ARTIFICIAL SEQUENCE
  Synthetic Construct
KKLESK

SEQ ID NO: 22487 - protein, 6 aa, ARTIFICIAL SEQUENCE
  Synthetic Construct
KKLETK

SEQ ID NO: 22488 - protein, 6 aa, ARTIFICIAL SEQUENCE
  Synthetic Construct
KKLEYK

SEQ ID NO: 22489 - protein, 6 aa, ARTIFICIAL SEQUENCE
  Synthetic Construct
KKLFAK

SEQ ID NO: 22490 - protein, 6 aa, ARTIFICIAL SEQUENCE
  Synthetic Construct
KKLFDK

SEQ ID NO: 22491 - protein, 6 aa, ARTIFICIAL SEQUENCE
  Synthetic Construct
KKLFEK

SEQ ID NO: 22492 - protein, 6 aa, ARTIFICIAL SEQUENCE
  Synthetic Construct
KKLFFK

SEQ ID NO: 22493 - protein, 6 aa, ARTIFICIAL SEQUENCE
  Synthetic Construct
KKLFGK

SEQ ID NO: 22494 - protein, 6 aa, ARTIFICIAL SEQUENCE
  Synthetic Construct
KKLFHK

SEQ ID NO: 22495 - protein, 6 aa, ARTIFICIAL SEQUENCE
  Synthetic Construct
KKLFIK

SEQ ID NO: 22496 - protein, 6 aa, ARTIFICIAL SEQUENCE
  Synthetic Construct
KKLFLK

SEQ ID NO: 22497 - protein, 6 aa, ARTIFICIAL SEQUENCE
  Synthetic Construct
KKLFNK

SEQ ID NO: 22498 - protein, 6 aa, ARTIFICIAL SEQUENCE
  Synthetic Construct
KKLFQK

SEQ ID NO: 22499 - protein, 6 aa, ARTIFICIAL SEQUENCE
  Synthetic Construct
KKLFRK

SEQ ID NO: 22500 - protein, 6 aa, ARTIFICIAL SEQUENCE
  Synthetic Construct
KKLFSK

SEQ ID NO: 22501 - protein, 6 aa, ARTIFICIAL SEQUENCE
  Synthetic Construct
KKLFTK

SEQ ID NO: 22502 - protein, 6 aa, ARTIFICIAL SEQUENCE
  Synthetic Construct
KKLFYK

SEQ ID NO: 22503 - protein, 6 aa, ARTIFICIAL SEQUENCE
  Synthetic Construct
KKLGAK

SEQ ID NO: 22504 - protein, 6 aa, ARTIFICIAL SEQUENCE
  Synthetic Construct
KKLGDK

SEQ ID NO: 22505 - protein, 6 aa, ARTIFICIAL SEQUENCE
  Synthetic Construct
KKLGEK

SEQ ID NO: 22506 - protein, 6 aa, ARTIFICIAL SEQUENCE
  Synthetic Construct
KKLGFK

SEQ ID NO: 22507 - protein, 6 aa, ARTIFICIAL SEQUENCE
  Synthetic Construct
KKLGGK

SEQ ID NO: 22508 - protein, 6 aa, ARTIFICIAL SEQUENCE
  Synthetic Construct
KKLGHK

SEQ ID NO: 22509 - protein, 6 aa, ARTIFICIAL SEQUENCE
  Synthetic Construct
KKLGIK

SEQ ID NO: 22510 - protein, 6 aa, ARTIFICIAL SEQUENCE
  Synthetic Construct
KKLGLK

SEQ ID NO: 22511 - protein, 6 aa, ARTIFICIAL SEQUENCE
  Synthetic Construct
KKLGNK

SEQ ID NO: 22512 - protein, 6 aa, ARTIFICIAL SEQUENCE
  Synthetic Construct
KKLGQK

SEQ ID NO: 22513 - protein, 6 aa, ARTIFICIAL SEQUENCE
  Synthetic Construct
KKLGRK

SEQ ID NO: 22514 - protein, 6 aa, ARTIFICIAL SEQUENCE
  Synthetic Construct
KKLGSK

SEQ ID NO: 22515 - protein, 6 aa, ARTIFICIAL SEQUENCE
  Synthetic Construct
KKLGTK

SEQ ID NO: 22516 - protein, 6 aa, ARTIFICIAL SEQUENCE
  Synthetic Construct
KKLGYK

SEQ ID NO: 22517 - protein, 6 aa, ARTIFICIAL SEQUENCE
  Synthetic Construct
KKLHAK

SEQ ID NO: 22518 - protein, 6 aa, ARTIFICIAL SEQUENCE
  Synthetic Construct
KKLHDK

SEQ ID NO: 22519 - protein, 6 aa, ARTIFICIAL SEQUENCE
  Synthetic Construct
KKLHEK

SEQ ID NO: 22520 - protein, 6 aa, ARTIFICIAL SEQUENCE
  Synthetic Construct
KKLHFK

SEQ ID NO: 22521 - protein, 6 aa, ARTIFICIAL SEQUENCE
  Synthetic Construct
KKLHGK

SEQ ID NO: 22522 - protein, 6 aa, ARTIFICIAL SEQUENCE
  Synthetic Construct
KKLHHK

SEQ ID NO: 22523 - protein, 6 aa, ARTIFICIAL SEQUENCE
  Synthetic Construct
KKLHIK

SEQ ID NO: 22524 - protein, 6 aa, ARTIFICIAL SEQUENCE
  Synthetic Construct
KKLHLK

SEQ ID NO: 22525 - protein, 6 aa, ARTIFICIAL SEQUENCE
  Synthetic Construct
KKLHNK

SEQ ID NO: 22526 - protein, 6 aa, ARTIFICIAL SEQUENCE
  Synthetic Construct
KKLHQK

SEQ ID NO: 22527 - protein, 6 aa, ARTIFICIAL SEQUENCE
  Synthetic Construct
KKLHRK

SEQ ID NO: 22528 - protein, 6 aa, ARTIFICIAL SEQUENCE
  Synthetic Construct
KKLHSK

SEQ ID NO: 22529 - protein, 6 aa, ARTIFICIAL SEQUENCE
  Synthetic Construct
KKLHTK

SEQ ID NO: 22530 - protein, 6 aa, ARTIFICIAL SEQUENCE
  Synthetic Construct
KKLHYK

SEQ ID NO: 22531 - protein, 6 aa, ARTIFICIAL SEQUENCE
  Synthetic Construct
KKLIAK

SEQ ID NO: 22532 - protein, 6 aa, ARTIFICIAL SEQUENCE
  Synthetic Construct
KKLIDK

SEQ ID NO: 22533 - protein, 6 aa, ARTIFICIAL SEQUENCE
  Synthetic Construct
KKLIEK

SEQ ID NO: 22534 - protein, 6 aa, ARTIFICIAL SEQUENCE
  Synthetic Construct
KKLIFK

SEQ ID NO: 22535 - protein, 6 aa, ARTIFICIAL SEQUENCE
  Synthetic Construct
KKLIGK

SEQ ID NO: 22536 - protein, 6 aa, ARTIFICIAL SEQUENCE
  Synthetic Construct
KKLIHK

SEQ ID NO: 22537 - protein, 6 aa, ARTIFICIAL SEQUENCE
  Synthetic Construct
KKLIIK

SEQ ID NO: 22538 - protein, 6 aa, ARTIFICIAL SEQUENCE
  Synthetic Construct
KKLILK

SEQ ID NO: 22539 - protein, 6 aa, ARTIFICIAL SEQUENCE
  Synthetic Construct
KKLINK

SEQ ID NO: 22540 - protein, 6 aa, ARTIFICIAL SEQUENCE
  Synthetic Construct
KKLIQK

SEQ ID NO: 22541 - protein, 6 aa, ARTIFICIAL SEQUENCE
  Synthetic Construct
KKLIRK

SEQ ID NO: 22542 - protein, 6 aa, ARTIFICIAL SEQUENCE
  Synthetic Construct
KKLISK

SEQ ID NO: 22543 - protein, 6 aa, ARTIFICIAL SEQUENCE
  Synthetic Construct
KKLITK

SEQ ID NO: 22544 - protein, 6 aa, ARTIFICIAL SEQUENCE
  Synthetic Construct
KKLIYK

SEQ ID NO: 22545 - protein, 6 aa, ARTIFICIAL SEQUENCE
  Synthetic Construct
KKLLAK

SEQ ID NO: 22546 - protein, 6 aa, ARTIFICIAL SEQUENCE
  Synthetic Construct
KKLLDK

SEQ ID NO: 22547 - protein, 6 aa, ARTIFICIAL SEQUENCE
  Synthetic Construct
KKLLEK

SEQ ID NO: 22548 - protein, 6 aa, ARTIFICIAL SEQUENCE
  Synthetic Construct
KKLLFK

SEQ ID NO: 22549 - protein, 6 aa, ARTIFICIAL SEQUENCE
  Synthetic Construct
KKLLGK

SEQ ID NO: 22550 - protein, 6 aa, ARTIFICIAL SEQUENCE
  Synthetic Construct
KKLLHK

SEQ ID NO: 22551 - protein, 6 aa, ARTIFICIAL SEQUENCE
  Synthetic Construct
KKLLIK

SEQ ID NO: 22552 - protein, 6 aa, ARTIFICIAL SEQUENCE
  Synthetic Construct
KKLLLK

SEQ ID NO: 22553 - protein, 6 aa, ARTIFICIAL SEQUENCE
  Synthetic Construct
KKLLNK

SEQ ID NO: 22554 - protein, 6 aa, ARTIFICIAL SEQUENCE
  Synthetic Construct
KKLLQK

SEQ ID NO: 22555 - protein, 6 aa, ARTIFICIAL SEQUENCE
  Synthetic Construct
KKLLRK

SEQ ID NO: 22556 - protein, 6 aa, ARTIFICIAL SEQUENCE
  Synthetic Construct
KKLLSK

SEQ ID NO: 22557 - protein, 6 aa, ARTIFICIAL SEQUENCE
  Synthetic Construct
KKLLTK

SEQ ID NO: 22558 - protein, 6 aa, ARTIFICIAL SEQUENCE
  Synthetic Construct
KKLLYK

SEQ ID NO: 22559 - protein, 6 aa, ARTIFICIAL SEQUENCE
  Synthetic Construct
KKLNAK

SEQ ID NO: 22560 - protein, 6 aa, ARTIFICIAL SEQUENCE
  Synthetic Construct
KKLNDK

SEQ ID NO: 22561 - protein, 6 aa, ARTIFICIAL SEQUENCE
  Synthetic Construct
KKLNEK

SEQ ID NO: 22562 - protein, 6 aa, ARTIFICIAL SEQUENCE
  Synthetic Construct
KKLNFK

SEQ ID NO: 22563 - protein, 6 aa, ARTIFICIAL SEQUENCE
  Synthetic Construct
KKLNGK

SEQ ID NO: 22564 - protein, 6 aa, ARTIFICIAL SEQUENCE
  Synthetic Construct
KKLNHK

SEQ ID NO: 22565 - protein, 6 aa, ARTIFICIAL SEQUENCE
  Synthetic Construct
KKLNIK

SEQ ID NO: 22566 - protein, 6 aa, ARTIFICIAL SEQUENCE
  Synthetic Construct
KKLNLK

SEQ ID NO: 22567 - protein, 6 aa, ARTIFICIAL SEQUENCE
  Synthetic Construct
KKLNNK

SEQ ID NO: 22568 - protein, 6 aa, ARTIFICIAL SEQUENCE
  Synthetic Construct
KKLNQK

SEQ ID NO: 22569 - protein, 6 aa, ARTIFICIAL SEQUENCE
  Synthetic Construct
KKLNRK

SEQ ID NO: 22570 - protein, 6 aa, ARTIFICIAL SEQUENCE
  Synthetic Construct
KKLNSK

SEQ ID NO: 22571 - protein, 6 aa, ARTIFICIAL SEQUENCE
  Synthetic Construct
KKLNTK

SEQ ID NO: 22572 - protein, 6 aa, ARTIFICIAL SEQUENCE
  Synthetic Construct
KKLNYK

SEQ ID NO: 22573 - protein, 6 aa, ARTIFICIAL SEQUENCE
  Synthetic Construct
KKLQAK

SEQ ID NO: 22574 - protein, 6 aa, ARTIFICIAL SEQUENCE
  Synthetic Construct
KKLQDK

SEQ ID NO: 22575 - protein, 6 aa, ARTIFICIAL SEQUENCE
  Synthetic Construct
KKLQEK

SEQ ID NO: 22576 - protein, 6 aa, ARTIFICIAL SEQUENCE
  Synthetic Construct
KKLQFK

SEQ ID NO: 22577 - protein, 6 aa, ARTIFICIAL SEQUENCE
  Synthetic Construct
KKLQGK

SEQ ID NO: 22578 - protein, 6 aa, ARTIFICIAL SEQUENCE
  Synthetic Construct
KKLQHK

SEQ ID NO: 22579 - protein, 6 aa, ARTIFICIAL SEQUENCE
  Synthetic Construct
KKLQIK

SEQ ID NO: 22580 - protein, 6 aa, ARTIFICIAL SEQUENCE
  Synthetic Construct
KKLQLK

SEQ ID NO: 22581 - protein, 6 aa, ARTIFICIAL SEQUENCE
  Synthetic Construct
KKLQNK

SEQ ID NO: 22582 - protein, 6 aa, ARTIFICIAL SEQUENCE
  Synthetic Construct
KKLQQK

SEQ ID NO: 22583 - protein, 6 aa, ARTIFICIAL SEQUENCE
  Synthetic Construct
KKLQRK

SEQ ID NO: 22584 - protein, 6 aa, ARTIFICIAL SEQUENCE
  Synthetic Construct
KKLQSK

SEQ ID NO: 22585 - protein, 6 aa, ARTIFICIAL SEQUENCE
  Synthetic Construct
KKLQTK

SEQ ID NO: 22586 - protein, 6 aa, ARTIFICIAL SEQUENCE
  Synthetic Construct
KKLQYK

SEQ ID NO: 22587 - protein, 6 aa, ARTIFICIAL SEQUENCE
  Synthetic Construct
KKLRAK

SEQ ID NO: 22588 - protein, 6 aa, ARTIFICIAL SEQUENCE
  Synthetic Construct
KKLRDK

SEQ ID NO: 22589 - protein, 6 aa, ARTIFICIAL SEQUENCE
  Synthetic Construct
KKLREK

SEQ ID NO: 22590 - protein, 6 aa, ARTIFICIAL SEQUENCE
  Synthetic Construct
KKLRFK

SEQ ID NO: 22591 - protein, 6 aa, ARTIFICIAL SEQUENCE
  Synthetic Construct
KKLRGK

SEQ ID NO: 22592 - protein, 6 aa, ARTIFICIAL SEQUENCE
  Synthetic Construct
KKLRHK

SEQ ID NO: 22593 - protein, 6 aa, ARTIFICIAL SEQUENCE
  Synthetic Construct
KKLRIK

SEQ ID NO: 22594 - protein, 6 aa, ARTIFICIAL SEQUENCE
  Synthetic Construct
KKLRLK

SEQ ID NO: 22595 - protein, 6 aa, ARTIFICIAL SEQUENCE
  Synthetic Construct
KKLRNK

SEQ ID NO: 22596 - protein, 6 aa, ARTIFICIAL SEQUENCE
  Synthetic Construct
KKLRQK

SEQ ID NO: 22597 - protein, 6 aa, ARTIFICIAL SEQUENCE
  Synthetic Construct
KKLRRK

SEQ ID NO: 22598 - protein, 6 aa, ARTIFICIAL SEQUENCE
  Synthetic Construct
KKLRSK

SEQ ID NO: 22599 - protein, 6 aa, ARTIFICIAL SEQUENCE
  Synthetic Construct
KKLRTK

SEQ ID NO: 22600 - protein, 6 aa, ARTIFICIAL SEQUENCE
  Synthetic Construct
KKLRYK

SEQ ID NO: 22601 - protein, 6 aa, ARTIFICIAL SEQUENCE
  Synthetic Construct
KKLSAK

SEQ ID NO: 22602 - protein, 6 aa, ARTIFICIAL SEQUENCE
  Synthetic Construct
KKLSDK

SEQ ID NO: 22603 - protein, 6 aa, ARTIFICIAL SEQUENCE
  Synthetic Construct
KKLSEK

SEQ ID NO: 22604 - protein, 6 aa, ARTIFICIAL SEQUENCE
  Synthetic Construct
KKLSFK

SEQ ID NO: 22605 - protein, 6 aa, ARTIFICIAL SEQUENCE
  Synthetic Construct
KKLSGK

SEQ ID NO: 22606 - protein, 6 aa, ARTIFICIAL SEQUENCE
  Synthetic Construct
KKLSHK

SEQ ID NO: 22607 - protein, 6 aa, ARTIFICIAL SEQUENCE
  Synthetic Construct
KKLSIK

SEQ ID NO: 22608 - protein, 6 aa, ARTIFICIAL SEQUENCE
  Synthetic Construct
KKLSLK

SEQ ID NO: 22609 - protein, 6 aa, ARTIFICIAL SEQUENCE
  Synthetic Construct
KKLSNK

SEQ ID NO: 22610 - protein, 6 aa, ARTIFICIAL SEQUENCE
  Synthetic Construct
KKLSQK

SEQ ID NO: 22611 - protein, 6 aa, ARTIFICIAL SEQUENCE
  Synthetic Construct
KKLSRK

SEQ ID NO: 22612 - protein, 6 aa, ARTIFICIAL SEQUENCE
  Synthetic Construct
KKLSSK

SEQ ID NO: 22613 - protein, 6 aa, ARTIFICIAL SEQUENCE
  Synthetic Construct
KKLSTK

SEQ ID NO: 22614 - protein, 6 aa, ARTIFICIAL SEQUENCE
  Synthetic Construct
KKLSYK

SEQ ID NO: 22615 - protein, 6 aa, ARTIFICIAL SEQUENCE
  Synthetic Construct
KKLTAK

SEQ ID NO: 22616 - protein, 6 aa, ARTIFICIAL SEQUENCE
  Synthetic Construct
KKLTDK

SEQ ID NO: 22617 - protein, 6 aa, ARTIFICIAL SEQUENCE
  Synthetic Construct
KKLTEK

SEQ ID NO: 22618 - protein, 6 aa, ARTIFICIAL SEQUENCE
  Synthetic Construct
KKLTFK

SEQ ID NO: 22619 - protein, 6 aa, ARTIFICIAL SEQUENCE
  Synthetic Construct
KKLTGK

SEQ ID NO: 22620 - protein, 6 aa, ARTIFICIAL SEQUENCE
  Synthetic Construct
KKLTHK

SEQ ID NO: 22621 - protein, 6 aa, ARTIFICIAL SEQUENCE
  Synthetic Construct
KKLTIK

SEQ ID NO: 22622 - protein, 6 aa, ARTIFICIAL SEQUENCE
  Synthetic Construct
KKLTLK

SEQ ID NO: 22623 - protein, 6 aa, ARTIFICIAL SEQUENCE
  Synthetic Construct
KKLTNK

SEQ ID NO: 22624 - protein, 6 aa, ARTIFICIAL SEQUENCE
  Synthetic Construct
KKLTQK

SEQ ID NO: 22625 - protein, 6 aa, ARTIFICIAL SEQUENCE
  Synthetic Construct
KKLTRK

SEQ ID NO: 22626 - protein, 6 aa, ARTIFICIAL SEQUENCE
  Synthetic Construct
KKLTSK

SEQ ID NO: 22627 - protein, 6 aa, ARTIFICIAL SEQUENCE
  Synthetic Construct
KKLTTK

SEQ ID NO: 22628 - protein, 6 aa, ARTIFICIAL SEQUENCE
  Synthetic Construct
KKLTYK

SEQ ID NO: 22629 - protein, 6 aa, ARTIFICIAL SEQUENCE
  Synthetic Construct
KKLYAK

SEQ ID NO: 22630 - protein, 6 aa, ARTIFICIAL SEQUENCE
  Synthetic Construct
KKLYDK

SEQ ID NO: 22631 - protein, 6 aa, ARTIFICIAL SEQUENCE
  Synthetic Construct
KKLYEK

SEQ ID NO: 22632 - protein, 6 aa, ARTIFICIAL SEQUENCE
  Synthetic Construct
KKLYFK

SEQ ID NO: 22633 - protein, 6 aa, ARTIFICIAL SEQUENCE
  Synthetic Construct
KKLYGK

SEQ ID NO: 22634 - protein, 6 aa, ARTIFICIAL SEQUENCE
  Synthetic Construct
KKLYHK

SEQ ID NO: 22635 - protein, 6 aa, ARTIFICIAL SEQUENCE
  Synthetic Construct
KKLYIK

SEQ ID NO: 22636 - protein, 6 aa, ARTIFICIAL SEQUENCE
  Synthetic Construct
KKLYLK

SEQ ID NO: 22637 - protein, 6 aa, ARTIFICIAL SEQUENCE
  Synthetic Construct
KKLYNK

SEQ ID NO: 22638 - protein, 6 aa, ARTIFICIAL SEQUENCE
  Synthetic Construct
KKLYQK

SEQ ID NO: 22639 - protein, 6 aa, ARTIFICIAL SEQUENCE
  Synthetic Construct
KKLYRK

SEQ ID NO: 22640 - protein, 6 aa, ARTIFICIAL SEQUENCE
  Synthetic Construct
KKLYSK

SEQ ID NO: 22641 - protein, 6 aa, ARTIFICIAL SEQUENCE
  Synthetic Construct
KKLYTK

SEQ ID NO: 22642 - protein, 6 aa, ARTIFICIAL SEQUENCE
  Synthetic Construct
KKLYYK

SEQ ID NO: 22643 - protein, 6 aa, ARTIFICIAL SEQUENCE
  Synthetic Construct
KKNAAK

SEQ ID NO: 22644 - protein, 6 aa, ARTIFICIAL SEQUENCE
  Synthetic Construct
KKNADK

SEQ ID NO: 22645 - protein, 6 aa, ARTIFICIAL SEQUENCE
  Synthetic Construct
KKNAEK

SEQ ID NO: 22646 - protein, 6 aa, ARTIFICIAL SEQUENCE
  Synthetic Construct
KKNAFK

SEQ ID NO: 22647 - protein, 6 aa, ARTIFICIAL SEQUENCE
  Synthetic Construct
KKNAGK

SEQ ID NO: 22648 - protein, 6 aa, ARTIFICIAL SEQUENCE
  Synthetic Construct
KKNAHK

SEQ ID NO: 22649 - protein, 6 aa, ARTIFICIAL SEQUENCE
  Synthetic Construct
KKNAIK

SEQ ID NO: 22650 - protein, 6 aa, ARTIFICIAL SEQUENCE
  Synthetic Construct
KKNALK

SEQ ID NO: 22651 - protein, 6 aa, ARTIFICIAL SEQUENCE
  Synthetic Construct
KKNANK

SEQ ID NO: 22652 - protein, 6 aa, ARTIFICIAL SEQUENCE
  Synthetic Construct
KKNAQK

SEQ ID NO: 22653 - protein, 6 aa, ARTIFICIAL SEQUENCE
  Synthetic Construct
KKNARK

SEQ ID NO: 22654 - protein, 6 aa, ARTIFICIAL SEQUENCE
  Synthetic Construct
KKNASK

SEQ ID NO: 22655 - protein, 6 aa, ARTIFICIAL SEQUENCE
  Synthetic Construct
KKNATK

SEQ ID NO: 22656 - protein, 6 aa, ARTIFICIAL SEQUENCE
  Synthetic Construct
KKNAYK

SEQ ID NO: 22657 - protein, 6 aa, ARTIFICIAL SEQUENCE
  Synthetic Construct
KKNDAK

SEQ ID NO: 22658 - protein, 6 aa, ARTIFICIAL SEQUENCE
  Synthetic Construct
KKNDDK

SEQ ID NO: 22659 - protein, 6 aa, ARTIFICIAL SEQUENCE
  Synthetic Construct
KKNDEK

SEQ ID NO: 22660 - protein, 6 aa, ARTIFICIAL SEQUENCE
  Synthetic Construct
KKNDFK

SEQ ID NO: 22661 - protein, 6 aa, ARTIFICIAL SEQUENCE
  Synthetic Construct
KKNDGK

SEQ ID NO: 22662 - protein, 6 aa, ARTIFICIAL SEQUENCE
  Synthetic Construct
KKNDHK

SEQ ID NO: 22663 - protein, 6 aa, ARTIFICIAL SEQUENCE
  Synthetic Construct
KKNDIK

SEQ ID NO: 22664 - protein, 6 aa, ARTIFICIAL SEQUENCE
  Synthetic Construct
KKNDLK

SEQ ID NO: 22665 - protein, 6 aa, ARTIFICIAL SEQUENCE
  Synthetic Construct
KKNDNK

SEQ ID NO: 22666 - protein, 6 aa, ARTIFICIAL SEQUENCE
  Synthetic Construct
KKNDQK

SEQ ID NO: 22667 - protein, 6 aa, ARTIFICIAL SEQUENCE
  Synthetic Construct
KKNDRK

SEQ ID NO: 22668 - protein, 6 aa, ARTIFICIAL SEQUENCE
  Synthetic Construct
KKNDSK

SEQ ID NO: 22669 - protein, 6 aa, ARTIFICIAL SEQUENCE
  Synthetic Construct
KKNDTK

SEQ ID NO: 22670 - protein, 6 aa, ARTIFICIAL SEQUENCE
  Synthetic Construct
KKNDYK

SEQ ID NO: 22671 - protein, 6 aa, ARTIFICIAL SEQUENCE
  Synthetic Construct
KKNEAK

SEQ ID NO: 22672 - protein, 6 aa, ARTIFICIAL SEQUENCE
  Synthetic Construct
KKNEDK

SEQ ID NO: 22673 - protein, 6 aa, ARTIFICIAL SEQUENCE
  Synthetic Construct
KKNEEK

SEQ ID NO: 22674 - protein, 6 aa, ARTIFICIAL SEQUENCE
  Synthetic Construct
KKNEFK

SEQ ID NO: 22675 - protein, 6 aa, ARTIFICIAL SEQUENCE
  Synthetic Construct
KKNEGK

SEQ ID NO: 22676 - protein, 6 aa, ARTIFICIAL SEQUENCE
  Synthetic Construct
KKNEHK

SEQ ID NO: 22677 - protein, 6 aa, ARTIFICIAL SEQUENCE
  Synthetic Construct
KKNEIK

SEQ ID NO: 22678 - protein, 6 aa, ARTIFICIAL SEQUENCE
  Synthetic Construct
KKNELK

SEQ ID NO: 22679 - protein, 6 aa, ARTIFICIAL SEQUENCE
  Synthetic Construct
KKNENK

SEQ ID NO: 22680 - protein, 6 aa, ARTIFICIAL SEQUENCE
  Synthetic Construct
KKNEQK

SEQ ID NO: 22681 - protein, 6 aa, ARTIFICIAL SEQUENCE
  Synthetic Construct
KKNERK

SEQ ID NO: 22682 - protein, 6 aa, ARTIFICIAL SEQUENCE
  Synthetic Construct
KKNESK

SEQ ID NO: 22683 - protein, 6 aa, ARTIFICIAL SEQUENCE
  Synthetic Construct
KKNETK

SEQ ID NO: 22684 - protein, 6 aa, ARTIFICIAL SEQUENCE
  Synthetic Construct
KKNEYK

SEQ ID NO: 22685 - protein, 6 aa, ARTIFICIAL SEQUENCE
  Synthetic Construct
KKNFAK

SEQ ID NO: 22686 - protein, 6 aa, ARTIFICIAL SEQUENCE
  Synthetic Construct
KKNFDK

SEQ ID NO: 22687 - protein, 6 aa, ARTIFICIAL SEQUENCE
  Synthetic Construct
KKNFEK

SEQ ID NO: 22688 - protein, 6 aa, ARTIFICIAL SEQUENCE
  Synthetic Construct
KKNFFK

SEQ ID NO: 22689 - protein, 6 aa, ARTIFICIAL SEQUENCE
  Synthetic Construct
KKNFGK

SEQ ID NO: 22690 - protein, 6 aa, ARTIFICIAL SEQUENCE
  Synthetic Construct
KKNFHK

SEQ ID NO: 22691 - protein, 6 aa, ARTIFICIAL SEQUENCE
  Synthetic Construct
KKNFIK

SEQ ID NO: 22692 - protein, 6 aa, ARTIFICIAL SEQUENCE
  Synthetic Construct
KKNFLK

SEQ ID NO: 22693 - protein, 6 aa, ARTIFICIAL SEQUENCE
  Synthetic Construct
KKNFNK

SEQ ID NO: 22694 - protein, 6 aa, ARTIFICIAL SEQUENCE
  Synthetic Construct
KKNFQK

SEQ ID NO: 22695 - protein, 6 aa, ARTIFICIAL SEQUENCE
  Synthetic Construct
KKNFRK

SEQ ID NO: 22696 - protein, 6 aa, ARTIFICIAL SEQUENCE
  Synthetic Construct
KKNFSK

SEQ ID NO: 22697 - protein, 6 aa, ARTIFICIAL SEQUENCE
  Synthetic Construct
KKNFTK

SEQ ID NO: 22698 - protein, 6 aa, ARTIFICIAL SEQUENCE
  Synthetic Construct
KKNFYK

SEQ ID NO: 22699 - protein, 6 aa, ARTIFICIAL SEQUENCE
  Synthetic Construct
KKNGAK

SEQ ID NO: 22700 - protein, 6 aa, ARTIFICIAL SEQUENCE
  Synthetic Construct
KKNGDK

SEQ ID NO: 22701 - protein, 6 aa, ARTIFICIAL SEQUENCE
  Synthetic Construct
KKNGEK

SEQ ID NO: 22702 - protein, 6 aa, ARTIFICIAL SEQUENCE
  Synthetic Construct
KKNGFK

SEQ ID NO: 22703 - protein, 6 aa, ARTIFICIAL SEQUENCE
  Synthetic Construct
KKNGGK

SEQ ID NO: 22704 - protein, 6 aa, ARTIFICIAL SEQUENCE
  Synthetic Construct
KKNGHK

SEQ ID NO: 22705 - protein, 6 aa, ARTIFICIAL SEQUENCE
  Synthetic Construct
KKNGIK

SEQ ID NO: 22706 - protein, 6 aa, ARTIFICIAL SEQUENCE
  Synthetic Construct
KKNGLK

SEQ ID NO: 22707 - protein, 6 aa, ARTIFICIAL SEQUENCE
  Synthetic Construct
KKNGNK

SEQ ID NO: 22708 - protein, 6 aa, ARTIFICIAL SEQUENCE
  Synthetic Construct
KKNGQK

SEQ ID NO: 22709 - protein, 6 aa, ARTIFICIAL SEQUENCE
  Synthetic Construct
KKNGRK

SEQ ID NO: 22710 - protein, 6 aa, ARTIFICIAL SEQUENCE
  Synthetic Construct
KKNGSK

SEQ ID NO: 22711 - protein, 6 aa, ARTIFICIAL SEQUENCE
  Synthetic Construct
KKNGTK

SEQ ID NO: 22712 - protein, 6 aa, ARTIFICIAL SEQUENCE
  Synthetic Construct
KKNGYK

SEQ ID NO: 22713 - protein, 6 aa, ARTIFICIAL SEQUENCE
  Synthetic Construct
KKNHAK

SEQ ID NO: 22714 - protein, 6 aa, ARTIFICIAL SEQUENCE
  Synthetic Construct
KKNHDK

SEQ ID NO: 22715 - protein, 6 aa, ARTIFICIAL SEQUENCE
  Synthetic Construct
KKNHEK

SEQ ID NO: 22716 - protein, 6 aa, ARTIFICIAL SEQUENCE
  Synthetic Construct
KKNHFK

SEQ ID NO: 22717 - protein, 6 aa, ARTIFICIAL SEQUENCE
  Synthetic Construct
KKNHGK

SEQ ID NO: 22718 - protein, 6 aa, ARTIFICIAL SEQUENCE
  Synthetic Construct
KKNHHK

SEQ ID NO: 22719 - protein, 6 aa, ARTIFICIAL SEQUENCE
  Synthetic Construct
KKNHIK

SEQ ID NO: 22720 - protein, 6 aa, ARTIFICIAL SEQUENCE
  Synthetic Construct
KKNHLK

SEQ ID NO: 22721 - protein, 6 aa, ARTIFICIAL SEQUENCE
  Synthetic Construct
KKNHNK

SEQ ID NO: 22722 - protein, 6 aa, ARTIFICIAL SEQUENCE
  Synthetic Construct
KKNHQK

SEQ ID NO: 22723 - protein, 6 aa, ARTIFICIAL SEQUENCE
  Synthetic Construct
KKNHRK

SEQ ID NO: 22724 - protein, 6 aa, ARTIFICIAL SEQUENCE
  Synthetic Construct
KKNHSK

SEQ ID NO: 22725 - protein, 6 aa, ARTIFICIAL SEQUENCE
  Synthetic Construct
KKNHTK

SEQ ID NO: 22726 - protein, 6 aa, ARTIFICIAL SEQUENCE
  Synthetic Construct
KKNHYK

SEQ ID NO: 22727 - protein, 6 aa, ARTIFICIAL SEQUENCE
  Synthetic Construct
KKNIAK

SEQ ID NO: 22728 - protein, 6 aa, ARTIFICIAL SEQUENCE
  Synthetic Construct
KKNIDK

SEQ ID NO: 22729 - protein, 6 aa, ARTIFICIAL SEQUENCE
  Synthetic Construct
KKNIEK

SEQ ID NO: 22730 - protein, 6 aa, ARTIFICIAL SEQUENCE
  Synthetic Construct
KKNIFK

SEQ ID NO: 22731 - protein, 6 aa, ARTIFICIAL SEQUENCE
  Synthetic Construct
KKNIGK

SEQ ID NO: 22732 - protein, 6 aa, ARTIFICIAL SEQUENCE
  Synthetic Construct
KKNIHK

SEQ ID NO: 22733 - protein, 6 aa, ARTIFICIAL SEQUENCE
  Synthetic Construct
KKNIIK

SEQ ID NO: 22734 - protein, 6 aa, ARTIFICIAL SEQUENCE
  Synthetic Construct
KKNILK

SEQ ID NO: 22735 - protein, 6 aa, ARTIFICIAL SEQUENCE
  Synthetic Construct
KKNINK

SEQ ID NO: 22736 - protein, 6 aa, ARTIFICIAL SEQUENCE
  Synthetic Construct
KKNIQK

SEQ ID NO: 22737 - protein, 6 aa, ARTIFICIAL SEQUENCE
  Synthetic Construct
KKNIRK

SEQ ID NO: 22738 - protein, 6 aa, ARTIFICIAL SEQUENCE
  Synthetic Construct
KKNISK

SEQ ID NO: 22739 - protein, 6 aa, ARTIFICIAL SEQUENCE
  Synthetic Construct
KKNITK

SEQ ID NO: 22740 - protein, 6 aa, ARTIFICIAL SEQUENCE
  Synthetic Construct
KKNIYK

SEQ ID NO: 22741 - protein, 6 aa, ARTIFICIAL SEQUENCE
  Synthetic Construct
KKNLAK

SEQ ID NO: 22742 - protein, 6 aa, ARTIFICIAL SEQUENCE
  Synthetic Construct
KKNLDK

SEQ ID NO: 22743 - protein, 6 aa, ARTIFICIAL SEQUENCE
  Synthetic Construct
KKNLEK

SEQ ID NO: 22744 - protein, 6 aa, ARTIFICIAL SEQUENCE
  Synthetic Construct
KKNLFK

SEQ ID NO: 22745 - protein, 6 aa, ARTIFICIAL SEQUENCE
  Synthetic Construct
KKNLGK

SEQ ID NO: 22746 - protein, 6 aa, ARTIFICIAL SEQUENCE
  Synthetic Construct
KKNLHK

SEQ ID NO: 22747 - protein, 6 aa, ARTIFICIAL SEQUENCE
  Synthetic Construct
KKNLIK

SEQ ID NO: 22748 - protein, 6 aa, ARTIFICIAL SEQUENCE
  Synthetic Construct
KKNLLK

SEQ ID NO: 22749 - protein, 6 aa, ARTIFICIAL SEQUENCE
  Synthetic Construct
KKNLNK

SEQ ID NO: 22750 - protein, 6 aa, ARTIFICIAL SEQUENCE
  Synthetic Construct
KKNLQK

SEQ ID NO: 22751 - protein, 6 aa, ARTIFICIAL SEQUENCE
  Synthetic Construct
KKNLRK

SEQ ID NO: 22752 - protein, 6 aa, ARTIFICIAL SEQUENCE
  Synthetic Construct
KKNLSK

SEQ ID NO: 22753 - protein, 6 aa, ARTIFICIAL SEQUENCE
  Synthetic Construct
KKNLTK

SEQ ID NO: 22754 - protein, 6 aa, ARTIFICIAL SEQUENCE
  Synthetic Construct
KKNLYK

SEQ ID NO: 22755 - protein, 6 aa, ARTIFICIAL SEQUENCE
  Synthetic Construct
KKNNAK

SEQ ID NO: 22756 - protein, 6 aa, ARTIFICIAL SEQUENCE
  Synthetic Construct
KKNNDK

SEQ ID NO: 22757 - protein, 6 aa, ARTIFICIAL SEQUENCE
  Synthetic Construct
KKNNEK

SEQ ID NO: 22758 - protein, 6 aa, ARTIFICIAL SEQUENCE
  Synthetic Construct
KKNNFK

SEQ ID NO: 22759 - protein, 6 aa, ARTIFICIAL SEQUENCE
  Synthetic Construct
KKNNGK

SEQ ID NO: 22760 - protein, 6 aa, ARTIFICIAL SEQUENCE
  Synthetic Construct
KKNNHK

SEQ ID NO: 22761 - protein, 6 aa, ARTIFICIAL SEQUENCE
  Synthetic Construct
KKNNIK

SEQ ID NO: 22762 - protein, 6 aa, ARTIFICIAL SEQUENCE
  Synthetic Construct
KKNNLK

SEQ ID NO: 22763 - protein, 6 aa, ARTIFICIAL SEQUENCE
  Synthetic Construct
KKNNNK

SEQ ID NO: 22764 - protein, 6 aa, ARTIFICIAL SEQUENCE
  Synthetic Construct
KKNNQK

SEQ ID NO: 22765 - protein, 6 aa, ARTIFICIAL SEQUENCE
  Synthetic Construct
KKNNRK

SEQ ID NO: 22766 - protein, 6 aa, ARTIFICIAL SEQUENCE
  Synthetic Construct
KKNNSK

SEQ ID NO: 22767 - protein, 6 aa, ARTIFICIAL SEQUENCE
  Synthetic Construct
KKNNTK

SEQ ID NO: 22768 - protein, 6 aa, ARTIFICIAL SEQUENCE
  Synthetic Construct
KKNNYK

SEQ ID NO: 22769 - protein, 6 aa, ARTIFICIAL SEQUENCE
  Synthetic Construct
KKNQAK

SEQ ID NO: 22770 - protein, 6 aa, ARTIFICIAL SEQUENCE
  Synthetic Construct
KKNQDK

SEQ ID NO: 22771 - protein, 6 aa, ARTIFICIAL SEQUENCE
  Synthetic Construct
KKNQEK

SEQ ID NO: 22772 - protein, 6 aa, ARTIFICIAL SEQUENCE
  Synthetic Construct
KKNQFK

SEQ ID NO: 22773 - protein, 6 aa, ARTIFICIAL SEQUENCE
  Synthetic Construct
KKNQGK

SEQ ID NO: 22774 - protein, 6 aa, ARTIFICIAL SEQUENCE
  Synthetic Construct
KKNQHK

SEQ ID NO: 22775 - protein, 6 aa, ARTIFICIAL SEQUENCE
  Synthetic Construct
KKNQIK

SEQ ID NO: 22776 - protein, 6 aa, ARTIFICIAL SEQUENCE
  Synthetic Construct
KKNQLK

SEQ ID NO: 22777 - protein, 6 aa, ARTIFICIAL SEQUENCE
  Synthetic Construct
KKNQNK

SEQ ID NO: 22778 - protein, 6 aa, ARTIFICIAL SEQUENCE
  Synthetic Construct
KKNQQK

SEQ ID NO: 22779 - protein, 6 aa, ARTIFICIAL SEQUENCE
  Synthetic Construct
KKNQRK

SEQ ID NO: 22780 - protein, 6 aa, ARTIFICIAL SEQUENCE
  Synthetic Construct
KKNQSK

SEQ ID NO: 22781 - protein, 6 aa, ARTIFICIAL SEQUENCE
  Synthetic Construct
KKNQTK

SEQ ID NO: 22782 - protein, 6 aa, ARTIFICIAL SEQUENCE
  Synthetic Construct
KKNQYK

SEQ ID NO: 22783 - protein, 6 aa, ARTIFICIAL SEQUENCE
  Synthetic Construct
KKNRAK

SEQ ID NO: 22784 - protein, 6 aa, ARTIFICIAL SEQUENCE
  Synthetic Construct
KKNRDK

SEQ ID NO: 22785 - protein, 6 aa, ARTIFICIAL SEQUENCE
  Synthetic Construct
KKNREK

SEQ ID NO: 22786 - protein, 6 aa, ARTIFICIAL SEQUENCE
  Synthetic Construct
KKNRFK

SEQ ID NO: 22787 - protein, 6 aa, ARTIFICIAL SEQUENCE
  Synthetic Construct
KKNRGK

SEQ ID NO: 22788 - protein, 6 aa, ARTIFICIAL SEQUENCE
  Synthetic Construct
KKNRHK

SEQ ID NO: 22789 - protein, 6 aa, ARTIFICIAL SEQUENCE
  Synthetic Construct
KKNRIK

SEQ ID NO: 22790 - protein, 6 aa, ARTIFICIAL SEQUENCE
  Synthetic Construct
KKNRLK

SEQ ID NO: 22791 - protein, 6 aa, ARTIFICIAL SEQUENCE
  Synthetic Construct
KKNRNK

SEQ ID NO: 22792 - protein, 6 aa, ARTIFICIAL SEQUENCE
  Synthetic Construct
KKNRQK

SEQ ID NO: 22793 - protein, 6 aa, ARTIFICIAL SEQUENCE
  Synthetic Construct
KKNRRK

SEQ ID NO: 22794 - protein, 6 aa, ARTIFICIAL SEQUENCE
  Synthetic Construct
KKNRSK

SEQ ID NO: 22795 - protein, 6 aa, ARTIFICIAL SEQUENCE
  Synthetic Construct
KKNRTK

SEQ ID NO: 22796 - protein, 6 aa, ARTIFICIAL SEQUENCE
  Synthetic Construct
KKNRYK

SEQ ID NO: 22797 - protein, 6 aa, ARTIFICIAL SEQUENCE
  Synthetic Construct
KKNSAK

SEQ ID NO: 22798 - protein, 6 aa, ARTIFICIAL SEQUENCE
  Synthetic Construct
KKNSDK

SEQ ID NO: 22799 - protein, 6 aa, ARTIFICIAL SEQUENCE
  Synthetic Construct
KKNSEK

SEQ ID NO: 22800 - protein, 6 aa, ARTIFICIAL SEQUENCE
  Synthetic Construct
KKNSFK

SEQ ID NO: 22801 - protein, 6 aa, ARTIFICIAL SEQUENCE
  Synthetic Construct
KKNSGK

SEQ ID NO: 22802 - protein, 6 aa, ARTIFICIAL SEQUENCE
  Synthetic Construct
KKNSHK

SEQ ID NO: 22803 - protein, 6 aa, ARTIFICIAL SEQUENCE
  Synthetic Construct
KKNSIK

SEQ ID NO: 22804 - protein, 6 aa, ARTIFICIAL SEQUENCE
  Synthetic Construct
KKNSLK

SEQ ID NO: 22805 - protein, 6 aa, ARTIFICIAL SEQUENCE
  Synthetic Construct
KKNSNK

SEQ ID NO: 22806 - protein, 6 aa, ARTIFICIAL SEQUENCE
  Synthetic Construct
KKNSQK

SEQ ID NO: 22807 - protein, 6 aa, ARTIFICIAL SEQUENCE
  Synthetic Construct
KKNSRK

SEQ ID NO: 22808 - protein, 6 aa, ARTIFICIAL SEQUENCE
  Synthetic Construct
KKNSSK

SEQ ID NO: 22809 - protein, 6 aa, ARTIFICIAL SEQUENCE
  Synthetic Construct
KKNSTK

SEQ ID NO: 22810 - protein, 6 aa, ARTIFICIAL SEQUENCE
  Synthetic Construct
KKNSYK

SEQ ID NO: 22811 - protein, 6 aa, ARTIFICIAL SEQUENCE
  Synthetic Construct
KKNTAK

SEQ ID NO: 22812 - protein, 6 aa, ARTIFICIAL SEQUENCE
  Synthetic Construct
KKNTDK

SEQ ID NO: 22813 - protein, 6 aa, ARTIFICIAL SEQUENCE
  Synthetic Construct
KKNTEK

SEQ ID NO: 22814 - protein, 6 aa, ARTIFICIAL SEQUENCE
  Synthetic Construct
KKNTFK

SEQ ID NO: 22815 - protein, 6 aa, ARTIFICIAL SEQUENCE
  Synthetic Construct
KKNTGK

SEQ ID NO: 22816 - protein, 6 aa, ARTIFICIAL SEQUENCE
  Synthetic Construct
KKNTHK

SEQ ID NO: 22817 - protein, 6 aa, ARTIFICIAL SEQUENCE
  Synthetic Construct
KKNTIK

SEQ ID NO: 22818 - protein, 6 aa, ARTIFICIAL SEQUENCE
  Synthetic Construct
KKNTLK

SEQ ID NO: 22819 - protein, 6 aa, ARTIFICIAL SEQUENCE
  Synthetic Construct
KKNTNK

SEQ ID NO: 22820 - protein, 6 aa, ARTIFICIAL SEQUENCE
  Synthetic Construct
KKNTQK

SEQ ID NO: 22821 - protein, 6 aa, ARTIFICIAL SEQUENCE
  Synthetic Construct
KKNTRK

SEQ ID NO: 22822 - protein, 6 aa, ARTIFICIAL SEQUENCE
  Synthetic Construct
KKNTSK

SEQ ID NO: 22823 - protein, 6 aa, ARTIFICIAL SEQUENCE
  Synthetic Construct
KKNTTK

SEQ ID NO: 22824 - protein, 6 aa, ARTIFICIAL SEQUENCE
  Synthetic Construct
KKNTYK

SEQ ID NO: 22825 - protein, 6 aa, ARTIFICIAL SEQUENCE
  Synthetic Construct
KKNYAK

SEQ ID NO: 22826 - protein, 6 aa, ARTIFICIAL SEQUENCE
  Synthetic Construct
KKNYDK

SEQ ID NO: 22827 - protein, 6 aa, ARTIFICIAL SEQUENCE
  Synthetic Construct
KKNYEK

SEQ ID NO: 22828 - protein, 6 aa, ARTIFICIAL SEQUENCE
  Synthetic Construct
KKNYFK

SEQ ID NO: 22829 - protein, 6 aa, ARTIFICIAL SEQUENCE
  Synthetic Construct
KKNYGK

SEQ ID NO: 22830 - protein, 6 aa, ARTIFICIAL SEQUENCE
  Synthetic Construct
KKNYHK

SEQ ID NO: 22831 - protein, 6 aa, ARTIFICIAL SEQUENCE
  Synthetic Construct
KKNYIK

SEQ ID NO: 22832 - protein, 6 aa, ARTIFICIAL SEQUENCE
  Synthetic Construct
KKNYLK

SEQ ID NO: 22833 - protein, 6 aa, ARTIFICIAL SEQUENCE
  Synthetic Construct
KKNYNK

SEQ ID NO: 22834 - protein, 6 aa, ARTIFICIAL SEQUENCE
  Synthetic Construct
KKNYQK

SEQ ID NO: 22835 - protein, 6 aa, ARTIFICIAL SEQUENCE
  Synthetic Construct
KKNYRK

SEQ ID NO: 22836 - protein, 6 aa, ARTIFICIAL SEQUENCE
  Synthetic Construct
KKNYSK

SEQ ID NO: 22837 - protein, 6 aa, ARTIFICIAL SEQUENCE
  Synthetic Construct
KKNYTK

SEQ ID NO: 22838 - protein, 6 aa, ARTIFICIAL SEQUENCE
  Synthetic Construct
KKNYYK

SEQ ID NO: 22839 - protein, 6 aa, ARTIFICIAL SEQUENCE
  Synthetic Construct
KKPAAK

SEQ ID NO: 22840 - protein, 6 aa, ARTIFICIAL SEQUENCE
  Synthetic Construct
KKPADK

SEQ ID NO: 22841 - protein, 6 aa, ARTIFICIAL SEQUENCE
  Synthetic Construct
KKPAEK

SEQ ID NO: 22842 - protein, 6 aa, ARTIFICIAL SEQUENCE
  Synthetic Construct
KKPAFK

SEQ ID NO: 22843 - protein, 6 aa, ARTIFICIAL SEQUENCE
  Synthetic Construct
KKPAGK

SEQ ID NO: 22844 - protein, 6 aa, ARTIFICIAL SEQUENCE
  Synthetic Construct
KKPAHK

SEQ ID NO: 22845 - protein, 6 aa, ARTIFICIAL SEQUENCE
  Synthetic Construct
KKPAIK

SEQ ID NO: 22846 - protein, 6 aa, ARTIFICIAL SEQUENCE
  Synthetic Construct
KKPALK

SEQ ID NO: 22847 - protein, 6 aa, ARTIFICIAL SEQUENCE
  Synthetic Construct
KKPANK

SEQ ID NO: 22848 - protein, 6 aa, ARTIFICIAL SEQUENCE
  Synthetic Construct
KKPAQK

SEQ ID NO: 22849 - protein, 6 aa, ARTIFICIAL SEQUENCE
  Synthetic Construct
KKPARK

SEQ ID NO: 22850 - protein, 6 aa, ARTIFICIAL SEQUENCE
  Synthetic Construct
KKPASK

SEQ ID NO: 22851 - protein, 6 aa, ARTIFICIAL SEQUENCE
  Synthetic Construct
KKPATK

SEQ ID NO: 22852 - protein, 6 aa, ARTIFICIAL SEQUENCE
  Synthetic Construct
KKPAYK

SEQ ID NO: 22853 - protein, 6 aa, ARTIFICIAL SEQUENCE
  Synthetic Construct
KKPDAK

SEQ ID NO: 22854 - protein, 6 aa, ARTIFICIAL SEQUENCE
  Synthetic Construct
KKPDDK

SEQ ID NO: 22855 - protein, 6 aa, ARTIFICIAL SEQUENCE
  Synthetic Construct
KKPDEK

SEQ ID NO: 22856 - protein, 6 aa, ARTIFICIAL SEQUENCE
  Synthetic Construct
KKPDFK

SEQ ID NO: 22857 - protein, 6 aa, ARTIFICIAL SEQUENCE
  Synthetic Construct
KKPDGK

SEQ ID NO: 22858 - protein, 6 aa, ARTIFICIAL SEQUENCE
  Synthetic Construct
KKPDHK

SEQ ID NO: 22859 - protein, 6 aa, ARTIFICIAL SEQUENCE
  Synthetic Construct
KKPDIK

SEQ ID NO: 22860 - protein, 6 aa, ARTIFICIAL SEQUENCE
  Synthetic Construct
KKPDLK

SEQ ID NO: 22861 - protein, 6 aa, ARTIFICIAL SEQUENCE
  Synthetic Construct
KKPDNK

SEQ ID NO: 22862 - protein, 6 aa, ARTIFICIAL SEQUENCE
  Synthetic Construct
KKPDQK

SEQ ID NO: 22863 - protein, 6 aa, ARTIFICIAL SEQUENCE
  Synthetic Construct
KKPDRK

SEQ ID NO: 22864 - protein, 6 aa, ARTIFICIAL SEQUENCE
  Synthetic Construct
KKPDSK

SEQ ID NO: 22865 - protein, 6 aa, ARTIFICIAL SEQUENCE
  Synthetic Construct
KKPDTK

SEQ ID NO: 22866 - protein, 6 aa, ARTIFICIAL SEQUENCE
  Synthetic Construct
KKPDYK

SEQ ID NO: 22867 - protein, 6 aa, ARTIFICIAL SEQUENCE
  Synthetic Construct
KKPEAK

SEQ ID NO: 22868 - protein, 6 aa, ARTIFICIAL SEQUENCE
  Synthetic Construct
KKPEDK

SEQ ID NO: 22869 - protein, 6 aa, ARTIFICIAL SEQUENCE
  Synthetic Construct
KKPEEK

SEQ ID NO: 22870 - protein, 6 aa, ARTIFICIAL SEQUENCE
  Synthetic Construct
KKPEFK

SEQ ID NO: 22871 - protein, 6 aa, ARTIFICIAL SEQUENCE
  Synthetic Construct
KKPEGK

SEQ ID NO: 22872 - protein, 6 aa, ARTIFICIAL SEQUENCE
  Synthetic Construct
KKPEHK

SEQ ID NO: 22873 - protein, 6 aa, ARTIFICIAL SEQUENCE
  Synthetic Construct
KKPEIK

SEQ ID NO: 22874 - protein, 6 aa, ARTIFICIAL SEQUENCE
  Synthetic Construct
KKPELK

SEQ ID NO: 22875 - protein, 6 aa, ARTIFICIAL SEQUENCE
  Synthetic Construct
KKPENK

SEQ ID NO: 22876 - protein, 6 aa, ARTIFICIAL SEQUENCE
  Synthetic Construct
KKPEQK

SEQ ID NO: 22877 - protein, 6 aa, ARTIFICIAL SEQUENCE
  Synthetic Construct
KKPERK

SEQ ID NO: 22878 - protein, 6 aa, ARTIFICIAL SEQUENCE
  Synthetic Construct
KKPESK

SEQ ID NO: 22879 - protein, 6 aa, ARTIFICIAL SEQUENCE
  Synthetic Construct
KKPETK

SEQ ID NO: 22880 - protein, 6 aa, ARTIFICIAL SEQUENCE
  Synthetic Construct
KKPEYK

SEQ ID NO: 22881 - protein, 6 aa, ARTIFICIAL SEQUENCE
  Synthetic Construct
KKPFAK

SEQ ID NO: 22882 - protein, 6 aa, ARTIFICIAL SEQUENCE
  Synthetic Construct
KKPFDK

SEQ ID NO: 22883 - protein, 6 aa, ARTIFICIAL SEQUENCE
  Synthetic Construct
KKPFEK

SEQ ID NO: 22884 - protein, 6 aa, ARTIFICIAL SEQUENCE
  Synthetic Construct
KKPFFK

SEQ ID NO: 22885 - protein, 6 aa, ARTIFICIAL SEQUENCE
  Synthetic Construct
KKPFGK

SEQ ID NO: 22886 - protein, 6 aa, ARTIFICIAL SEQUENCE
  Synthetic Construct
KKPFHK

SEQ ID NO: 22887 - protein, 6 aa, ARTIFICIAL SEQUENCE
  Synthetic Construct
KKPFIK

SEQ ID NO: 22888 - protein, 6 aa, ARTIFICIAL SEQUENCE
  Synthetic Construct
KKPFLK

SEQ ID NO: 22889 - protein, 6 aa, ARTIFICIAL SEQUENCE
  Synthetic Construct
KKPFNK

SEQ ID NO: 22890 - protein, 6 aa, ARTIFICIAL SEQUENCE
  Synthetic Construct
KKPFQK

SEQ ID NO: 22891 - protein, 6 aa, ARTIFICIAL SEQUENCE
  Synthetic Construct
KKPFRK

SEQ ID NO: 22892 - protein, 6 aa, ARTIFICIAL SEQUENCE
  Synthetic Construct
KKPFSK

SEQ ID NO: 22893 - protein, 6 aa, ARTIFICIAL SEQUENCE
  Synthetic Construct
KKPFTK

SEQ ID NO: 22894 - protein, 6 aa, ARTIFICIAL SEQUENCE
  Synthetic Construct
KKPFYK

SEQ ID NO: 22895 - protein, 6 aa, ARTIFICIAL SEQUENCE
  Synthetic Construct
KKPGAK

SEQ ID NO: 22896 - protein, 6 aa, ARTIFICIAL SEQUENCE
  Synthetic Construct
KKPGDK

SEQ ID NO: 22897 - protein, 6 aa, ARTIFICIAL SEQUENCE
  Synthetic Construct
KKPGEK

SEQ ID NO: 22898 - protein, 6 aa, ARTIFICIAL SEQUENCE
  Synthetic Construct
KKPGFK

SEQ ID NO: 22899 - protein, 6 aa, ARTIFICIAL SEQUENCE
  Synthetic Construct
KKPGGK

SEQ ID NO: 22900 - protein, 6 aa, ARTIFICIAL SEQUENCE
  Synthetic Construct
KKPGHK

SEQ ID NO: 22901 - protein, 6 aa, ARTIFICIAL SEQUENCE
  Synthetic Construct
KKPGIK

SEQ ID NO: 22902 - protein, 6 aa, ARTIFICIAL SEQUENCE
  Synthetic Construct
KKPGLK

SEQ ID NO: 22903 - protein, 6 aa, ARTIFICIAL SEQUENCE
  Synthetic Construct
KKPGNK

SEQ ID NO: 22904 - protein, 6 aa, ARTIFICIAL SEQUENCE
  Synthetic Construct
KKPGQK

SEQ ID NO: 22905 - protein, 6 aa, ARTIFICIAL SEQUENCE
  Synthetic Construct
KKPGRK

SEQ ID NO: 22906 - protein, 6 aa, ARTIFICIAL SEQUENCE
  Synthetic Construct
KKPGSK

SEQ ID NO: 22907 - protein, 6 aa, ARTIFICIAL SEQUENCE
  Synthetic Construct
KKPGTK

SEQ ID NO: 22908 - protein, 6 aa, ARTIFICIAL SEQUENCE
  Synthetic Construct
KKPGYK

SEQ ID NO: 22909 - protein, 6 aa, ARTIFICIAL SEQUENCE
  Synthetic Construct
KKPHAK

SEQ ID NO: 22910 - protein, 6 aa, ARTIFICIAL SEQUENCE
  Synthetic Construct
KKPHDK

SEQ ID NO: 22911 - protein, 6 aa, ARTIFICIAL SEQUENCE
  Synthetic Construct
KKPHEK

SEQ ID NO: 22912 - protein, 6 aa, ARTIFICIAL SEQUENCE
  Synthetic Construct
KKPHFK

SEQ ID NO: 22913 - protein, 6 aa, ARTIFICIAL SEQUENCE
  Synthetic Construct
KKPHGK

SEQ ID NO: 22914 - protein, 6 aa, ARTIFICIAL SEQUENCE
  Synthetic Construct
KKPHHK

SEQ ID NO: 22915 - protein, 6 aa, ARTIFICIAL SEQUENCE
  Synthetic Construct
KKPHIK

SEQ ID NO: 22916 - protein, 6 aa, ARTIFICIAL SEQUENCE
  Synthetic Construct
KKPHLK

SEQ ID NO: 22917 - protein, 6 aa, ARTIFICIAL SEQUENCE
  Synthetic Construct
KKPHNK

SEQ ID NO: 22918 - protein, 6 aa, ARTIFICIAL SEQUENCE
  Synthetic Construct
KKPHQK

SEQ ID NO: 22919 - protein, 6 aa, ARTIFICIAL SEQUENCE
  Synthetic Construct
KKPHRK

SEQ ID NO: 22920 - protein, 6 aa, ARTIFICIAL SEQUENCE
  Synthetic Construct
KKPHSK

SEQ ID NO: 22921 - protein, 6 aa, ARTIFICIAL SEQUENCE
  Synthetic Construct
KKPHTK

SEQ ID NO: 22922 - protein, 6 aa, ARTIFICIAL SEQUENCE
  Synthetic Construct
KKPHYK

SEQ ID NO: 22923 - protein, 6 aa, ARTIFICIAL SEQUENCE
  Synthetic Construct
KKPIAK

SEQ ID NO: 22924 - protein, 6 aa, ARTIFICIAL SEQUENCE
  Synthetic Construct
KKPIDK

SEQ ID NO: 22925 - protein, 6 aa, ARTIFICIAL SEQUENCE
  Synthetic Construct
KKPIEK

SEQ ID NO: 22926 - protein, 6 aa, ARTIFICIAL SEQUENCE
  Synthetic Construct
KKPIFK

SEQ ID NO: 22927 - protein, 6 aa, ARTIFICIAL SEQUENCE
  Synthetic Construct
KKPIGK

SEQ ID NO: 22928 - protein, 6 aa, ARTIFICIAL SEQUENCE
  Synthetic Construct
KKPIHK

SEQ ID NO: 22929 - protein, 6 aa, ARTIFICIAL SEQUENCE
  Synthetic Construct
KKPIIK

SEQ ID NO: 22930 - protein, 6 aa, ARTIFICIAL SEQUENCE
  Synthetic Construct
KKPILK

SEQ ID NO: 22931 - protein, 6 aa, ARTIFICIAL SEQUENCE
  Synthetic Construct
KKPINK

SEQ ID NO: 22932 - protein, 6 aa, ARTIFICIAL SEQUENCE
  Synthetic Construct
KKPIQK

SEQ ID NO: 22933 - protein, 6 aa, ARTIFICIAL SEQUENCE
  Synthetic Construct
KKPIRK

SEQ ID NO: 22934 - protein, 6 aa, ARTIFICIAL SEQUENCE
  Synthetic Construct
KKPISK

SEQ ID NO: 22935 - protein, 6 aa, ARTIFICIAL SEQUENCE
  Synthetic Construct
KKPITK

SEQ ID NO: 22936 - protein, 6 aa, ARTIFICIAL SEQUENCE
  Synthetic Construct
KKPIYK

SEQ ID NO: 22937 - protein, 6 aa, ARTIFICIAL SEQUENCE
  Synthetic Construct
KKPLAK

SEQ ID NO: 22938 - protein, 6 aa, ARTIFICIAL SEQUENCE
  Synthetic Construct
KKPLDK

SEQ ID NO: 22939 - protein, 6 aa, ARTIFICIAL SEQUENCE
  Synthetic Construct
KKPLEK

SEQ ID NO: 22940 - protein, 6 aa, ARTIFICIAL SEQUENCE
  Synthetic Construct
KKPLFK

SEQ ID NO: 22941 - protein, 6 aa, ARTIFICIAL SEQUENCE
  Synthetic Construct
KKPLGK

SEQ ID NO: 22942 - protein, 6 aa, ARTIFICIAL SEQUENCE
  Synthetic Construct
KKPLHK

SEQ ID NO: 22943 - protein, 6 aa, ARTIFICIAL SEQUENCE
  Synthetic Construct
KKPLIK

SEQ ID NO: 22944 - protein, 6 aa, ARTIFICIAL SEQUENCE
  Synthetic Construct
KKPLLK

SEQ ID NO: 22945 - protein, 6 aa, ARTIFICIAL SEQUENCE
  Synthetic Construct
KKPLNK

SEQ ID NO: 22946 - protein, 6 aa, ARTIFICIAL SEQUENCE
  Synthetic Construct
KKPLQK

SEQ ID NO: 22947 - protein, 6 aa, ARTIFICIAL SEQUENCE
  Synthetic Construct
KKPLRK

SEQ ID NO: 22948 - protein, 6 aa, ARTIFICIAL SEQUENCE
  Synthetic Construct
KKPLSK

SEQ ID NO: 22949 - protein, 6 aa, ARTIFICIAL SEQUENCE
  Synthetic Construct
KKPLTK

SEQ ID NO: 22950 - protein, 6 aa, ARTIFICIAL SEQUENCE
  Synthetic Construct
KKPLYK

SEQ ID NO: 22951 - protein, 6 aa, ARTIFICIAL SEQUENCE
  Synthetic Construct
KKPNAK

SEQ ID NO: 22952 - protein, 6 aa, ARTIFICIAL SEQUENCE
  Synthetic Construct
KKPNDK

SEQ ID NO: 22953 - protein, 6 aa, ARTIFICIAL SEQUENCE
  Synthetic Construct
KKPNEK

SEQ ID NO: 22954 - protein, 6 aa, ARTIFICIAL SEQUENCE
  Synthetic Construct
KKPNFK

SEQ ID NO: 22955 - protein, 6 aa, ARTIFICIAL SEQUENCE
  Synthetic Construct
KKPNGK

SEQ ID NO: 22956 - protein, 6 aa, ARTIFICIAL SEQUENCE
  Synthetic Construct
KKPNHK

SEQ ID NO: 22957 - protein, 6 aa, ARTIFICIAL SEQUENCE
  Synthetic Construct
KKPNIK

SEQ ID NO: 22958 - protein, 6 aa, ARTIFICIAL SEQUENCE
  Synthetic Construct
KKPNLK

SEQ ID NO: 22959 - protein, 6 aa, ARTIFICIAL SEQUENCE
  Synthetic Construct
KKPNNK

SEQ ID NO: 22960 - protein, 6 aa, ARTIFICIAL SEQUENCE
  Synthetic Construct
KKPNQK

SEQ ID NO: 22961 - protein, 6 aa, ARTIFICIAL SEQUENCE
  Synthetic Construct
KKPNRK

SEQ ID NO: 22962 - protein, 6 aa, ARTIFICIAL SEQUENCE
  Synthetic Construct
KKPNSK

SEQ ID NO: 22963 - protein, 6 aa, ARTIFICIAL SEQUENCE
  Synthetic Construct
KKPNTK

SEQ ID NO: 22964 - protein, 6 aa, ARTIFICIAL SEQUENCE
  Synthetic Construct
KKPNYK

SEQ ID NO: 22965 - protein, 6 aa, ARTIFICIAL SEQUENCE
  Synthetic Construct
KKPQAK

SEQ ID NO: 22966 - protein, 6 aa, ARTIFICIAL SEQUENCE
  Synthetic Construct
KKPQDK

SEQ ID NO: 22967 - protein, 6 aa, ARTIFICIAL SEQUENCE
  Synthetic Construct
KKPQEK

SEQ ID NO: 22968 - protein, 6 aa, ARTIFICIAL SEQUENCE
  Synthetic Construct
KKPQFK

SEQ ID NO: 22969 - protein, 6 aa, ARTIFICIAL SEQUENCE
  Synthetic Construct
KKPQGK

SEQ ID NO: 22970 - protein, 6 aa, ARTIFICIAL SEQUENCE
  Synthetic Construct
KKPQHK

SEQ ID NO: 22971 - protein, 6 aa, ARTIFICIAL SEQUENCE
  Synthetic Construct
KKPQIK

SEQ ID NO: 22972 - protein, 6 aa, ARTIFICIAL SEQUENCE
  Synthetic Construct
KKPQLK

SEQ ID NO: 22973 - protein, 6 aa, ARTIFICIAL SEQUENCE
  Synthetic Construct
KKPQNK

SEQ ID NO: 22974 - protein, 6 aa, ARTIFICIAL SEQUENCE
  Synthetic Construct
KKPQQK

SEQ ID NO: 22975 - protein, 6 aa, ARTIFICIAL SEQUENCE
  Synthetic Construct
KKPQRK

SEQ ID NO: 22976 - protein, 6 aa, ARTIFICIAL SEQUENCE
  Synthetic Construct
KKPQSK

SEQ ID NO: 22977 - protein, 6 aa, ARTIFICIAL SEQUENCE
  Synthetic Construct
KKPQTK

SEQ ID NO: 22978 - protein, 6 aa, ARTIFICIAL SEQUENCE
  Synthetic Construct
KKPQYK

SEQ ID NO: 22979 - protein, 6 aa, ARTIFICIAL SEQUENCE
  Synthetic Construct
KKPRAK

SEQ ID NO: 22980 - protein, 6 aa, ARTIFICIAL SEQUENCE
  Synthetic Construct
KKPRDK

SEQ ID NO: 22981 - protein, 6 aa, ARTIFICIAL SEQUENCE
  Synthetic Construct
KKPREK

SEQ ID NO: 22982 - protein, 6 aa, ARTIFICIAL SEQUENCE
  Synthetic Construct
KKPRFK

SEQ ID NO: 22983 - protein, 6 aa, ARTIFICIAL SEQUENCE
  Synthetic Construct
KKPRGK

SEQ ID NO: 22984 - protein, 6 aa, ARTIFICIAL SEQUENCE
  Synthetic Construct
KKPRHK

SEQ ID NO: 22985 - protein, 6 aa, ARTIFICIAL SEQUENCE
  Synthetic Construct
KKPRIK

SEQ ID NO: 22986 - protein, 6 aa, ARTIFICIAL SEQUENCE
  Synthetic Construct
KKPRLK

SEQ ID NO: 22987 - protein, 6 aa, ARTIFICIAL SEQUENCE
  Synthetic Construct
KKPRNK

SEQ ID NO: 22988 - protein, 6 aa, ARTIFICIAL SEQUENCE
  Synthetic Construct
KKPRQK

SEQ ID NO: 22989 - protein, 6 aa, ARTIFICIAL SEQUENCE
  Synthetic Construct
KKPRRK

SEQ ID NO: 22990 - protein, 6 aa, ARTIFICIAL SEQUENCE
  Synthetic Construct
KKPRSK

SEQ ID NO: 22991 - protein, 6 aa, ARTIFICIAL SEQUENCE
  Synthetic Construct
KKPRTK

SEQ ID NO: 22992 - protein, 6 aa, ARTIFICIAL SEQUENCE
  Synthetic Construct
KKPRYK

SEQ ID NO: 22993 - protein, 6 aa, ARTIFICIAL SEQUENCE
  Synthetic Construct
KKPSAK

SEQ ID NO: 22994 - protein, 6 aa, ARTIFICIAL SEQUENCE
  Synthetic Construct
KKPSDK

SEQ ID NO: 22995 - protein, 6 aa, ARTIFICIAL SEQUENCE
  Synthetic Construct
KKPSEK

SEQ ID NO: 22996 - protein, 6 aa, ARTIFICIAL SEQUENCE
  Synthetic Construct
KKPSFK

SEQ ID NO: 22997 - protein, 6 aa, ARTIFICIAL SEQUENCE
  Synthetic Construct
KKPSGK

SEQ ID NO: 22998 - protein, 6 aa, ARTIFICIAL SEQUENCE
  Synthetic Construct
KKPSHK

SEQ ID NO: 22999 - protein, 6 aa, ARTIFICIAL SEQUENCE
  Synthetic Construct
KKPSIK

SEQ ID NO: 23000 - protein, 6 aa, ARTIFICIAL SEQUENCE
  Synthetic Construct
KKPSLK

SEQ ID NO: 23001 - protein, 6 aa, ARTIFICIAL SEQUENCE
  Synthetic Construct
KKPSNK

SEQ ID NO: 23002 - protein, 6 aa, ARTIFICIAL SEQUENCE
  Synthetic Construct
KKPSQK

SEQ ID NO: 23003 - protein, 6 aa, ARTIFICIAL SEQUENCE
  Synthetic Construct
KKPSRK

SEQ ID NO: 23004 - protein, 6 aa, ARTIFICIAL SEQUENCE
  Synthetic Construct
KKPSSK

SEQ ID NO: 23005 - protein, 6 aa, ARTIFICIAL SEQUENCE
  Synthetic Construct
KKPSTK

SEQ ID NO: 23006 - protein, 6 aa, ARTIFICIAL SEQUENCE
  Synthetic Construct
KKPSYK

SEQ ID NO: 23007 - protein, 6 aa, ARTIFICIAL SEQUENCE
  Synthetic Construct
KKPTAK

SEQ ID NO: 23008 - protein, 6 aa, ARTIFICIAL SEQUENCE
  Synthetic Construct
KKPTDK

SEQ ID NO: 23009 - protein, 6 aa, ARTIFICIAL SEQUENCE
  Synthetic Construct
KKPTEK

SEQ ID NO: 23010 - protein, 6 aa, ARTIFICIAL SEQUENCE
  Synthetic Construct
KKPTFK

SEQ ID NO: 23011 - protein, 6 aa, ARTIFICIAL SEQUENCE
  Synthetic Construct
KKPTGK

SEQ ID NO: 23012 - protein, 6 aa, ARTIFICIAL SEQUENCE
  Synthetic Construct
KKPTHK

SEQ ID NO: 23013 - protein, 6 aa, ARTIFICIAL SEQUENCE
  Synthetic Construct
KKPTIK

SEQ ID NO: 23014 - protein, 6 aa, ARTIFICIAL SEQUENCE
  Synthetic Construct
KKPTLK

SEQ ID NO: 23015 - protein, 6 aa, ARTIFICIAL SEQUENCE
  Synthetic Construct
KKPTNK

SEQ ID NO: 23016 - protein, 6 aa, ARTIFICIAL SEQUENCE
  Synthetic Construct
KKPTQK

SEQ ID NO: 23017 - protein, 6 aa, ARTIFICIAL SEQUENCE
  Synthetic Construct
KKPTRK

SEQ ID NO: 23018 - protein, 6 aa, ARTIFICIAL SEQUENCE
  Synthetic Construct
KKPTSK

SEQ ID NO: 23019 - protein, 6 aa, ARTIFICIAL SEQUENCE
  Synthetic Construct
KKPTTK

SEQ ID NO: 23020 - protein, 6 aa, ARTIFICIAL SEQUENCE
  Synthetic Construct
KKPTYK

SEQ ID NO: 23021 - protein, 6 aa, ARTIFICIAL SEQUENCE
  Synthetic Construct
KKPYAK

SEQ ID NO: 23022 - protein, 6 aa, ARTIFICIAL SEQUENCE
  Synthetic Construct
KKPYDK

SEQ ID NO: 23023 - protein, 6 aa, ARTIFICIAL SEQUENCE
  Synthetic Construct
KKPYEK

SEQ ID NO: 23024 - protein, 6 aa, ARTIFICIAL SEQUENCE
  Synthetic Construct
KKPYFK

SEQ ID NO: 23025 - protein, 6 aa, ARTIFICIAL SEQUENCE
  Synthetic Construct
KKPYGK

SEQ ID NO: 23026 - protein, 6 aa, ARTIFICIAL SEQUENCE
  Synthetic Construct
KKPYHK

SEQ ID NO: 23027 - protein, 6 aa, ARTIFICIAL SEQUENCE
  Synthetic Construct
KKPYIK

SEQ ID NO: 23028 - protein, 6 aa, ARTIFICIAL SEQUENCE
  Synthetic Construct
KKPYLK

SEQ ID NO: 23029 - protein, 6 aa, ARTIFICIAL SEQUENCE
  Synthetic Construct
KKPYNK

SEQ ID NO: 23030 - protein, 6 aa, ARTIFICIAL SEQUENCE
  Synthetic Construct
KKPYQK

SEQ ID NO: 23031 - protein, 6 aa, ARTIFICIAL SEQUENCE
  Synthetic Construct
KKPYRK

SEQ ID NO: 23032 - protein, 6 aa, ARTIFICIAL SEQUENCE
  Synthetic Construct
KKPYSK

SEQ ID NO: 23033 - protein, 6 aa, ARTIFICIAL SEQUENCE
  Synthetic Construct
KKPYTK

SEQ ID NO: 23034 - protein, 6 aa, ARTIFICIAL SEQUENCE
  Synthetic Construct
KKPYYK

SEQ ID NO: 23035 - protein, 6 aa, ARTIFICIAL SEQUENCE
  Synthetic Construct
KKQAAK

SEQ ID NO: 23036 - protein, 6 aa, ARTIFICIAL SEQUENCE
  Synthetic Construct
KKQADK

SEQ ID NO: 23037 - protein, 6 aa, ARTIFICIAL SEQUENCE
  Synthetic Construct
KKQAEK

SEQ ID NO: 23038 - protein, 6 aa, ARTIFICIAL SEQUENCE
  Synthetic Construct
KKQAFK

SEQ ID NO: 23039 - protein, 6 aa, ARTIFICIAL SEQUENCE
  Synthetic Construct
KKQAGK

SEQ ID NO: 23040 - protein, 6 aa, ARTIFICIAL SEQUENCE
  Synthetic Construct
KKQAHK

SEQ ID NO: 23041 - protein, 6 aa, ARTIFICIAL SEQUENCE
  Synthetic Construct
KKQAIK

SEQ ID NO: 23042 - protein, 6 aa, ARTIFICIAL SEQUENCE
  Synthetic Construct
KKQALK

SEQ ID NO: 23043 - protein, 6 aa, ARTIFICIAL SEQUENCE
  Synthetic Construct
KKQANK

SEQ ID NO: 23044 - protein, 6 aa, ARTIFICIAL SEQUENCE
  Synthetic Construct
KKQAQK

SEQ ID NO: 23045 - protein, 6 aa, ARTIFICIAL SEQUENCE
  Synthetic Construct
KKQARK

SEQ ID NO: 23046 - protein, 6 aa, ARTIFICIAL SEQUENCE
  Synthetic Construct
KKQASK

SEQ ID NO: 23047 - protein, 6 aa, ARTIFICIAL SEQUENCE
  Synthetic Construct
KKQATK

SEQ ID NO: 23048 - protein, 6 aa, ARTIFICIAL SEQUENCE
  Synthetic Construct
KKQAYK

SEQ ID NO: 23049 - protein, 6 aa, ARTIFICIAL SEQUENCE
  Synthetic Construct
KKQDAK

SEQ ID NO: 23050 - protein, 6 aa, ARTIFICIAL SEQUENCE
  Synthetic Construct
KKQDDK

SEQ ID NO: 23051 - protein, 6 aa, ARTIFICIAL SEQUENCE
  Synthetic Construct
KKQDEK

SEQ ID NO: 23052 - protein, 6 aa, ARTIFICIAL SEQUENCE
  Synthetic Construct
KKQDFK

SEQ ID NO: 23053 - protein, 6 aa, ARTIFICIAL SEQUENCE
  Synthetic Construct
KKQDGK

SEQ ID NO: 23054 - protein, 6 aa, ARTIFICIAL SEQUENCE
  Synthetic Construct
KKQDHK

SEQ ID NO: 23055 - protein, 6 aa, ARTIFICIAL SEQUENCE
  Synthetic Construct
KKQDIK

SEQ ID NO: 23056 - protein, 6 aa, ARTIFICIAL SEQUENCE
  Synthetic Construct
KKQDLK

SEQ ID NO: 23057 - protein, 6 aa, ARTIFICIAL SEQUENCE
  Synthetic Construct
KKQDNK

SEQ ID NO: 23058 - protein, 6 aa, ARTIFICIAL SEQUENCE
  Synthetic Construct
KKQDQK

SEQ ID NO: 23059 - protein, 6 aa, ARTIFICIAL SEQUENCE
  Synthetic Construct
KKQDRK

SEQ ID NO: 23060 - protein, 6 aa, ARTIFICIAL SEQUENCE
  Synthetic Construct
KKQDSK

SEQ ID NO: 23061 - protein, 6 aa, ARTIFICIAL SEQUENCE
  Synthetic Construct
KKQDTK

SEQ ID NO: 23062 - protein, 6 aa, ARTIFICIAL SEQUENCE
  Synthetic Construct
KKQDYK

SEQ ID NO: 23063 - protein, 6 aa, ARTIFICIAL SEQUENCE
  Synthetic Construct
KKQEAK

SEQ ID NO: 23064 - protein, 6 aa, ARTIFICIAL SEQUENCE
  Synthetic Construct
KKQEDK

SEQ ID NO: 23065 - protein, 6 aa, ARTIFICIAL SEQUENCE
  Synthetic Construct
KKQEEK

SEQ ID NO: 23066 - protein, 6 aa, ARTIFICIAL SEQUENCE
  Synthetic Construct
KKQEFK

SEQ ID NO: 23067 - protein, 6 aa, ARTIFICIAL SEQUENCE
  Synthetic Construct
KKQEGK

SEQ ID NO: 23068 - protein, 6 aa, ARTIFICIAL SEQUENCE
  Synthetic Construct
KKQEHK

SEQ ID NO: 23069 - protein, 6 aa, ARTIFICIAL SEQUENCE
  Synthetic Construct
KKQEIK

SEQ ID NO: 23070 - protein, 6 aa, ARTIFICIAL SEQUENCE
  Synthetic Construct
KKQELK

SEQ ID NO: 23071 - protein, 6 aa, ARTIFICIAL SEQUENCE
  Synthetic Construct
KKQENK

SEQ ID NO: 23072 - protein, 6 aa, ARTIFICIAL SEQUENCE
  Synthetic Construct
KKQEQK

SEQ ID NO: 23073 - protein, 6 aa, ARTIFICIAL SEQUENCE
  Synthetic Construct
KKQERK

SEQ ID NO: 23074 - protein, 6 aa, ARTIFICIAL SEQUENCE
  Synthetic Construct
KKQESK

SEQ ID NO: 23075 - protein, 6 aa, ARTIFICIAL SEQUENCE
  Synthetic Construct
KKQETK

SEQ ID NO: 23076 - protein, 6 aa, ARTIFICIAL SEQUENCE
  Synthetic Construct
KKQEYK

SEQ ID NO: 23077 - protein, 6 aa, ARTIFICIAL SEQUENCE
  Synthetic Construct
KKQFAK

SEQ ID NO: 23078 - protein, 6 aa, ARTIFICIAL SEQUENCE
  Synthetic Construct
KKQFDK

SEQ ID NO: 23079 - protein, 6 aa, ARTIFICIAL SEQUENCE
  Synthetic Construct
KKQFEK

SEQ ID NO: 23080 - protein, 6 aa, ARTIFICIAL SEQUENCE
  Synthetic Construct
KKQFFK

SEQ ID NO: 23081 - protein, 6 aa, ARTIFICIAL SEQUENCE
  Synthetic Construct
KKQFGK

SEQ ID NO: 23082 - protein, 6 aa, ARTIFICIAL SEQUENCE
  Synthetic Construct
KKQFHK

SEQ ID NO: 23083 - protein, 6 aa, ARTIFICIAL SEQUENCE
  Synthetic Construct
KKQFIK

SEQ ID NO: 23084 - protein, 6 aa, ARTIFICIAL SEQUENCE
  Synthetic Construct
KKQFLK

SEQ ID NO: 23085 - protein, 6 aa, ARTIFICIAL SEQUENCE
  Synthetic Construct
KKQFNK

SEQ ID NO: 23086 - protein, 6 aa, ARTIFICIAL SEQUENCE
  Synthetic Construct
KKQFQK

SEQ ID NO: 23087 - protein, 6 aa, ARTIFICIAL SEQUENCE
  Synthetic Construct
KKQFRK

SEQ ID NO: 23088 - protein, 6 aa, ARTIFICIAL SEQUENCE
  Synthetic Construct
KKQFSK

SEQ ID NO: 23089 - protein, 6 aa, ARTIFICIAL SEQUENCE
  Synthetic Construct
KKQFTK

SEQ ID NO: 23090 - protein, 6 aa, ARTIFICIAL SEQUENCE
  Synthetic Construct
KKQFYK

SEQ ID NO: 23091 - protein, 6 aa, ARTIFICIAL SEQUENCE
  Synthetic Construct
KKQGAK

SEQ ID NO: 23092 - protein, 6 aa, ARTIFICIAL SEQUENCE
  Synthetic Construct
KKQGDK

SEQ ID NO: 23093 - protein, 6 aa, ARTIFICIAL SEQUENCE
  Synthetic Construct
KKQGEK

SEQ ID NO: 23094 - protein, 6 aa, ARTIFICIAL SEQUENCE
  Synthetic Construct
KKQGFK

SEQ ID NO: 23095 - protein, 6 aa, ARTIFICIAL SEQUENCE
  Synthetic Construct
KKQGGK

SEQ ID NO: 23096 - protein, 6 aa, ARTIFICIAL SEQUENCE
  Synthetic Construct
KKQGHK

SEQ ID NO: 23097 - protein, 6 aa, ARTIFICIAL SEQUENCE
  Synthetic Construct
KKQGIK

SEQ ID NO: 23098 - protein, 6 aa, ARTIFICIAL SEQUENCE
  Synthetic Construct
KKQGLK

SEQ ID NO: 23099 - protein, 6 aa, ARTIFICIAL SEQUENCE
  Synthetic Construct
KKQGNK

SEQ ID NO: 23100 - protein, 6 aa, ARTIFICIAL SEQUENCE
  Synthetic Construct
KKQGQK

SEQ ID NO: 23101 - protein, 6 aa, ARTIFICIAL SEQUENCE
  Synthetic Construct
KKQGRK

SEQ ID NO: 23102 - protein, 6 aa, ARTIFICIAL SEQUENCE
  Synthetic Construct
KKQGSK

SEQ ID NO: 23103 - protein, 6 aa, ARTIFICIAL SEQUENCE
  Synthetic Construct
KKQGTK

SEQ ID NO: 23104 - protein, 6 aa, ARTIFICIAL SEQUENCE
  Synthetic Construct
KKQGYK

SEQ ID NO: 23105 - protein, 6 aa, ARTIFICIAL SEQUENCE
  Synthetic Construct
KKQHAK

SEQ ID NO: 23106 - protein, 6 aa, ARTIFICIAL SEQUENCE
  Synthetic Construct
KKQHDK

SEQ ID NO: 23107 - protein, 6 aa, ARTIFICIAL SEQUENCE
  Synthetic Construct
KKQHEK

SEQ ID NO: 23108 - protein, 6 aa, ARTIFICIAL SEQUENCE
  Synthetic Construct
KKQHFK

SEQ ID NO: 23109 - protein, 6 aa, ARTIFICIAL SEQUENCE
  Synthetic Construct
KKQHGK

SEQ ID NO: 23110 - protein, 6 aa, ARTIFICIAL SEQUENCE
  Synthetic Construct
KKQHHK

SEQ ID NO: 23111 - protein, 6 aa, ARTIFICIAL SEQUENCE
  Synthetic Construct
KKQHIK

SEQ ID NO: 23112 - protein, 6 aa, ARTIFICIAL SEQUENCE
  Synthetic Construct
KKQHLK

SEQ ID NO: 23113 - protein, 6 aa, ARTIFICIAL SEQUENCE
  Synthetic Construct
KKQHNK

SEQ ID NO: 23114 - protein, 6 aa, ARTIFICIAL SEQUENCE
  Synthetic Construct
KKQHQK

SEQ ID NO: 23115 - protein, 6 aa, ARTIFICIAL SEQUENCE
  Synthetic Construct
KKQHRK

SEQ ID NO: 23116 - protein, 6 aa, ARTIFICIAL SEQUENCE
  Synthetic Construct
KKQHSK

SEQ ID NO: 23117 - protein, 6 aa, ARTIFICIAL SEQUENCE
  Synthetic Construct
KKQHTK

SEQ ID NO: 23118 - protein, 6 aa, ARTIFICIAL SEQUENCE
  Synthetic Construct
KKQHYK

SEQ ID NO: 23119 - protein, 6 aa, ARTIFICIAL SEQUENCE
  Synthetic Construct
KKQIAK

SEQ ID NO: 23120 - protein, 6 aa, ARTIFICIAL SEQUENCE
  Synthetic Construct
KKQIDK

SEQ ID NO: 23121 - protein, 6 aa, ARTIFICIAL SEQUENCE
  Synthetic Construct
KKQIEK

SEQ ID NO: 23122 - protein, 6 aa, ARTIFICIAL SEQUENCE
  Synthetic Construct
KKQIFK

SEQ ID NO: 23123 - protein, 6 aa, ARTIFICIAL SEQUENCE
  Synthetic Construct
KKQIGK

SEQ ID NO: 23124 - protein, 6 aa, ARTIFICIAL SEQUENCE
  Synthetic Construct
KKQIHK

SEQ ID NO: 23125 - protein, 6 aa, ARTIFICIAL SEQUENCE
  Synthetic Construct
KKQIIK

SEQ ID NO: 23126 - protein, 6 aa, ARTIFICIAL SEQUENCE
  Synthetic Construct
KKQILK

SEQ ID NO: 23127 - protein, 6 aa, ARTIFICIAL SEQUENCE
  Synthetic Construct
KKQINK

SEQ ID NO: 23128 - protein, 6 aa, ARTIFICIAL SEQUENCE
  Synthetic Construct
KKQIQK

SEQ ID NO: 23129 - protein, 6 aa, ARTIFICIAL SEQUENCE
  Synthetic Construct
KKQIRK

SEQ ID NO: 23130 - protein, 6 aa, ARTIFICIAL SEQUENCE
  Synthetic Construct
KKQISK

SEQ ID NO: 23131 - protein, 6 aa, ARTIFICIAL SEQUENCE
  Synthetic Construct
KKQITK

SEQ ID NO: 23132 - protein, 6 aa, ARTIFICIAL SEQUENCE
  Synthetic Construct
KKQIYK

SEQ ID NO: 23133 - protein, 6 aa, ARTIFICIAL SEQUENCE
  Synthetic Construct
KKQLAK

SEQ ID NO: 23134 - protein, 6 aa, ARTIFICIAL SEQUENCE
  Synthetic Construct
KKQLDK

SEQ ID NO: 23135 - protein, 6 aa, ARTIFICIAL SEQUENCE
  Synthetic Construct
KKQLEK

SEQ ID NO: 23136 - protein, 6 aa, ARTIFICIAL SEQUENCE
  Synthetic Construct
KKQLFK

SEQ ID NO: 23137 - protein, 6 aa, ARTIFICIAL SEQUENCE
  Synthetic Construct
KKQLGK

SEQ ID NO: 23138 - protein, 6 aa, ARTIFICIAL SEQUENCE
  Synthetic Construct
KKQLHK

SEQ ID NO: 23139 - protein, 6 aa, ARTIFICIAL SEQUENCE
  Synthetic Construct
KKQLIK

SEQ ID NO: 23140 - protein, 6 aa, ARTIFICIAL SEQUENCE
  Synthetic Construct
KKQLLK

SEQ ID NO: 23141 - protein, 6 aa, ARTIFICIAL SEQUENCE
  Synthetic Construct
KKQLNK

SEQ ID NO: 23142 - protein, 6 aa, ARTIFICIAL SEQUENCE
  Synthetic Construct
KKQLQK

SEQ ID NO: 23143 - protein, 6 aa, ARTIFICIAL SEQUENCE
  Synthetic Construct
KKQLRK

SEQ ID NO: 23144 - protein, 6 aa, ARTIFICIAL SEQUENCE
  Synthetic Construct
KKQLSK

SEQ ID NO: 23145 - protein, 6 aa, ARTIFICIAL SEQUENCE
  Synthetic Construct
KKQLTK

SEQ ID NO: 23146 - protein, 6 aa, ARTIFICIAL SEQUENCE
  Synthetic Construct
KKQLYK

SEQ ID NO: 23147 - protein, 6 aa, ARTIFICIAL SEQUENCE
  Synthetic Construct
KKQNAK

SEQ ID NO: 23148 - protein, 6 aa, ARTIFICIAL SEQUENCE
  Synthetic Construct
KKQNDK

SEQ ID NO: 23149 - protein, 6 aa, ARTIFICIAL SEQUENCE
  Synthetic Construct
KKQNEK

SEQ ID NO: 23150 - protein, 6 aa, ARTIFICIAL SEQUENCE
  Synthetic Construct
KKQNFK

SEQ ID NO: 23151 - protein, 6 aa, ARTIFICIAL SEQUENCE
  Synthetic Construct
KKQNGK

SEQ ID NO: 23152 - protein, 6 aa, ARTIFICIAL SEQUENCE
  Synthetic Construct
KKQNHK

SEQ ID NO: 23153 - protein, 6 aa, ARTIFICIAL SEQUENCE
  Synthetic Construct
KKQNIK

SEQ ID NO: 23154 - protein, 6 aa, ARTIFICIAL SEQUENCE
  Synthetic Construct
KKQNLK

SEQ ID NO: 23155 - protein, 6 aa, ARTIFICIAL SEQUENCE
  Synthetic Construct
KKQNNK

SEQ ID NO: 23156 - protein, 6 aa, ARTIFICIAL SEQUENCE
  Synthetic Construct
KKQNQK

SEQ ID NO: 23157 - protein, 6 aa, ARTIFICIAL SEQUENCE
  Synthetic Construct
KKQNRK

SEQ ID NO: 23158 - protein, 6 aa, ARTIFICIAL SEQUENCE
  Synthetic Construct
KKQNSK

SEQ ID NO: 23159 - protein, 6 aa, ARTIFICIAL SEQUENCE
  Synthetic Construct
KKQNTK

SEQ ID NO: 23160 - protein, 6 aa, ARTIFICIAL SEQUENCE
  Synthetic Construct
KKQNYK

SEQ ID NO: 23161 - protein, 6 aa, ARTIFICIAL SEQUENCE
  Synthetic Construct
KKQQAK

SEQ ID NO: 23162 - protein, 6 aa, ARTIFICIAL SEQUENCE
  Synthetic Construct
KKQQDK

SEQ ID NO: 23163 - protein, 6 aa, ARTIFICIAL SEQUENCE
  Synthetic Construct
KKQQEK

SEQ ID NO: 23164 - protein, 6 aa, ARTIFICIAL SEQUENCE
  Synthetic Construct
KKQQFK

SEQ ID NO: 23165 - protein, 6 aa, ARTIFICIAL SEQUENCE
  Synthetic Construct
KKQQGK

SEQ ID NO: 23166 - protein, 6 aa, ARTIFICIAL SEQUENCE
  Synthetic Construct
KKQQHK

SEQ ID NO: 23167 - protein, 6 aa, ARTIFICIAL SEQUENCE
  Synthetic Construct
KKQQIK

SEQ ID NO: 23168 - protein, 6 aa, ARTIFICIAL SEQUENCE
  Synthetic Construct
KKQQLK

SEQ ID NO: 23169 - protein, 6 aa, ARTIFICIAL SEQUENCE
  Synthetic Construct
KKQQNK

SEQ ID NO: 23170 - protein, 6 aa, ARTIFICIAL SEQUENCE
  Synthetic Construct
KKQQQK

SEQ ID NO: 23171 - protein, 6 aa, ARTIFICIAL SEQUENCE
  Synthetic Construct
KKQQRK

SEQ ID NO: 23172 - protein, 6 aa, ARTIFICIAL SEQUENCE
  Synthetic Construct
KKQQSK

SEQ ID NO: 23173 - protein, 6 aa, ARTIFICIAL SEQUENCE
  Synthetic Construct
KKQQTK

SEQ ID NO: 23174 - protein, 6 aa, ARTIFICIAL SEQUENCE
  Synthetic Construct
KKQQYK

SEQ ID NO: 23175 - protein, 6 aa, ARTIFICIAL SEQUENCE
  Synthetic Construct
KKQRAK

SEQ ID NO: 23176 - protein, 6 aa, ARTIFICIAL SEQUENCE
  Synthetic Construct
KKQRDK

SEQ ID NO: 23177 - protein, 6 aa, ARTIFICIAL SEQUENCE
  Synthetic Construct
KKQREK

SEQ ID NO: 23178 - protein, 6 aa, ARTIFICIAL SEQUENCE
  Synthetic Construct
KKQRFK

SEQ ID NO: 23179 - protein, 6 aa, ARTIFICIAL SEQUENCE
  Synthetic Construct
KKQRGK

SEQ ID NO: 23180 - protein, 6 aa, ARTIFICIAL SEQUENCE
  Synthetic Construct
KKQRHK

SEQ ID NO: 23181 - protein, 6 aa, ARTIFICIAL SEQUENCE
  Synthetic Construct
KKQRIK

SEQ ID NO: 23182 - protein, 6 aa, ARTIFICIAL SEQUENCE
  Synthetic Construct
KKQRLK

SEQ ID NO: 23183 - protein, 6 aa, ARTIFICIAL SEQUENCE
  Synthetic Construct
KKQRNK

SEQ ID NO: 23184 - protein, 6 aa, ARTIFICIAL SEQUENCE
  Synthetic Construct
KKQRQK

SEQ ID NO: 23185 - protein, 6 aa, ARTIFICIAL SEQUENCE
  Synthetic Construct
KKQRRK

SEQ ID NO: 23186 - protein, 6 aa, ARTIFICIAL SEQUENCE
  Synthetic Construct
KKQRSK

SEQ ID NO: 23187 - protein, 6 aa, ARTIFICIAL SEQUENCE
  Synthetic Construct
KKQRTK

SEQ ID NO: 23188 - protein, 6 aa, ARTIFICIAL SEQUENCE
  Synthetic Construct
KKQRYK

SEQ ID NO: 23189 - protein, 6 aa, ARTIFICIAL SEQUENCE
  Synthetic Construct
KKQSAK

SEQ ID NO: 23190 - protein, 6 aa, ARTIFICIAL SEQUENCE
  Synthetic Construct
KKQSDK

SEQ ID NO: 23191 - protein, 6 aa, ARTIFICIAL SEQUENCE
  Synthetic Construct
KKQSEK

SEQ ID NO: 23192 - protein, 6 aa, ARTIFICIAL SEQUENCE
  Synthetic Construct
KKQSFK

SEQ ID NO: 23193 - protein, 6 aa, ARTIFICIAL SEQUENCE
  Synthetic Construct
KKQSGK

SEQ ID NO: 23194 - protein, 6 aa, ARTIFICIAL SEQUENCE
  Synthetic Construct
KKQSHK

SEQ ID NO: 23195 - protein, 6 aa, ARTIFICIAL SEQUENCE
  Synthetic Construct
KKQSIK

SEQ ID NO: 23196 - protein, 6 aa, ARTIFICIAL SEQUENCE
  Synthetic Construct
KKQSLK

SEQ ID NO: 23197 - protein, 6 aa, ARTIFICIAL SEQUENCE
  Synthetic Construct
KKQSNK

SEQ ID NO: 23198 - protein, 6 aa, ARTIFICIAL SEQUENCE
  Synthetic Construct
KKQSQK

SEQ ID NO: 23199 - protein, 6 aa, ARTIFICIAL SEQUENCE
  Synthetic Construct
KKQSRK

SEQ ID NO: 23200 - protein, 6 aa, ARTIFICIAL SEQUENCE
  Synthetic Construct
KKQSSK

SEQ ID NO: 23201 - protein, 6 aa, ARTIFICIAL SEQUENCE
  Synthetic Construct
KKQSTK

SEQ ID NO: 23202 - protein, 6 aa, ARTIFICIAL SEQUENCE
  Synthetic Construct
KKQSYK

SEQ ID NO: 23203 - protein, 6 aa, ARTIFICIAL SEQUENCE
  Synthetic Construct
KKQTAK

SEQ ID NO: 23204 - protein, 6 aa, ARTIFICIAL SEQUENCE
  Synthetic Construct
KKQTDK

SEQ ID NO: 23205 - protein, 6 aa, ARTIFICIAL SEQUENCE
  Synthetic Construct
KKQTEK

SEQ ID NO: 23206 - protein, 6 aa, ARTIFICIAL SEQUENCE
  Synthetic Construct
KKQTFK

SEQ ID NO: 23207 - protein, 6 aa, ARTIFICIAL SEQUENCE
  Synthetic Construct
KKQTGK

SEQ ID NO: 23208 - protein, 6 aa, ARTIFICIAL SEQUENCE
  Synthetic Construct
KKQTHK

SEQ ID NO: 23209 - protein, 6 aa, ARTIFICIAL SEQUENCE
  Synthetic Construct
KKQTIK

SEQ ID NO: 23210 - protein, 6 aa, ARTIFICIAL SEQUENCE
  Synthetic Construct
KKQTLK

SEQ ID NO: 23211 - protein, 6 aa, ARTIFICIAL SEQUENCE
  Synthetic Construct
KKQTNK

SEQ ID NO: 23212 - protein, 6 aa, ARTIFICIAL SEQUENCE
  Synthetic Construct
KKQTQK

SEQ ID NO: 23213 - protein, 6 aa, ARTIFICIAL SEQUENCE
  Synthetic Construct
KKQTRK

SEQ ID NO: 23214 - protein, 6 aa, ARTIFICIAL SEQUENCE
  Synthetic Construct
KKQTSK

SEQ ID NO: 23215 - protein, 6 aa, ARTIFICIAL SEQUENCE
  Synthetic Construct
KKQTTK

SEQ ID NO: 23216 - protein, 6 aa, ARTIFICIAL SEQUENCE
  Synthetic Construct
KKQTYK

SEQ ID NO: 23217 - protein, 6 aa, ARTIFICIAL SEQUENCE
  Synthetic Construct
KKQYAK

SEQ ID NO: 23218 - protein, 6 aa, ARTIFICIAL SEQUENCE
  Synthetic Construct
KKQYDK

SEQ ID NO: 23219 - protein, 6 aa, ARTIFICIAL SEQUENCE
  Synthetic Construct
KKQYEK

SEQ ID NO: 23220 - protein, 6 aa, ARTIFICIAL SEQUENCE
  Synthetic Construct
KKQYFK

SEQ ID NO: 23221 - protein, 6 aa, ARTIFICIAL SEQUENCE
  Synthetic Construct
KKQYGK

SEQ ID NO: 23222 - protein, 6 aa, ARTIFICIAL SEQUENCE
  Synthetic Construct
KKQYHK

SEQ ID NO: 23223 - protein, 6 aa, ARTIFICIAL SEQUENCE
  Synthetic Construct
KKQYIK

SEQ ID NO: 23224 - protein, 6 aa, ARTIFICIAL SEQUENCE
  Synthetic Construct
KKQYLK

SEQ ID NO: 23225 - protein, 6 aa, ARTIFICIAL SEQUENCE
  Synthetic Construct
KKQYNK

SEQ ID NO: 23226 - protein, 6 aa, ARTIFICIAL SEQUENCE
  Synthetic Construct
KKQYQK

SEQ ID NO: 23227 - protein, 6 aa, ARTIFICIAL SEQUENCE
  Synthetic Construct
KKQYRK

SEQ ID NO: 23228 - protein, 6 aa, ARTIFICIAL SEQUENCE
  Synthetic Construct
KKQYSK

SEQ ID NO: 23229 - protein, 6 aa, ARTIFICIAL SEQUENCE
  Synthetic Construct
KKQYTK

SEQ ID NO: 23230 - protein, 6 aa, ARTIFICIAL SEQUENCE
  Synthetic Construct
KKQYYK

SEQ ID NO: 23231 - protein, 6 aa, ARTIFICIAL SEQUENCE
  Synthetic Construct
KKRAAK

SEQ ID NO: 23232 - protein, 6 aa, ARTIFICIAL SEQUENCE
  Synthetic Construct
KKRADK

SEQ ID NO: 23233 - protein, 6 aa, ARTIFICIAL SEQUENCE
  Synthetic Construct
KKRAEK

SEQ ID NO: 23234 - protein, 6 aa, ARTIFICIAL SEQUENCE
  Synthetic Construct
KKRAFK

SEQ ID NO: 23235 - protein, 6 aa, ARTIFICIAL SEQUENCE
  Synthetic Construct
KKRAGK

SEQ ID NO: 23236 - protein, 6 aa, ARTIFICIAL SEQUENCE
  Synthetic Construct
KKRAHK

SEQ ID NO: 23237 - protein, 6 aa, ARTIFICIAL SEQUENCE
  Synthetic Construct
KKRAIK

SEQ ID NO: 23238 - protein, 6 aa, ARTIFICIAL SEQUENCE
  Synthetic Construct
KKRALK

SEQ ID NO: 23239 - protein, 6 aa, ARTIFICIAL SEQUENCE
  Synthetic Construct
KKRANK

SEQ ID NO: 23240 - protein, 6 aa, ARTIFICIAL SEQUENCE
  Synthetic Construct
KKRAQK

SEQ ID NO: 23241 - protein, 6 aa, ARTIFICIAL SEQUENCE
  Synthetic Construct
KKRARK

SEQ ID NO: 23242 - protein, 6 aa, ARTIFICIAL SEQUENCE
  Synthetic Construct
KKRASK

SEQ ID NO: 23243 - protein, 6 aa, ARTIFICIAL SEQUENCE
  Synthetic Construct
KKRATK

SEQ ID NO: 23244 - protein, 6 aa, ARTIFICIAL SEQUENCE
  Synthetic Construct
KKRAYK

SEQ ID NO: 23245 - protein, 6 aa, ARTIFICIAL SEQUENCE
  Synthetic Construct
KKRDAK

SEQ ID NO: 23246 - protein, 6 aa, ARTIFICIAL SEQUENCE
  Synthetic Construct
KKRDDK

SEQ ID NO: 23247 - protein, 6 aa, ARTIFICIAL SEQUENCE
  Synthetic Construct
KKRDEK

SEQ ID NO: 23248 - protein, 6 aa, ARTIFICIAL SEQUENCE
  Synthetic Construct
KKRDFK

SEQ ID NO: 23249 - protein, 6 aa, ARTIFICIAL SEQUENCE
  Synthetic Construct
KKRDGK

SEQ ID NO: 23250 - protein, 6 aa, ARTIFICIAL SEQUENCE
  Synthetic Construct
KKRDHK

SEQ ID NO: 23251 - protein, 6 aa, ARTIFICIAL SEQUENCE
  Synthetic Construct
KKRDIK

SEQ ID NO: 23252 - protein, 6 aa, ARTIFICIAL SEQUENCE
  Synthetic Construct
KKRDLK

SEQ ID NO: 23253 - protein, 6 aa, ARTIFICIAL SEQUENCE
  Synthetic Construct
KKRDNK

SEQ ID NO: 23254 - protein, 6 aa, ARTIFICIAL SEQUENCE
  Synthetic Construct
KKRDQK

SEQ ID NO: 23255 - protein, 6 aa, ARTIFICIAL SEQUENCE
  Synthetic Construct
KKRDRK

SEQ ID NO: 23256 - protein, 6 aa, ARTIFICIAL SEQUENCE
  Synthetic Construct
KKRDSK

SEQ ID NO: 23257 - protein, 6 aa, ARTIFICIAL SEQUENCE
  Synthetic Construct
KKRDTK

SEQ ID NO: 23258 - protein, 6 aa, ARTIFICIAL SEQUENCE
  Synthetic Construct
KKRDYK

SEQ ID NO: 23259 - protein, 6 aa, ARTIFICIAL SEQUENCE
  Synthetic Construct
KKREAK

SEQ ID NO: 23260 - protein, 6 aa, ARTIFICIAL SEQUENCE
  Synthetic Construct
KKREDK

SEQ ID NO: 23261 - protein, 6 aa, ARTIFICIAL SEQUENCE
  Synthetic Construct
KKREEK

SEQ ID NO: 23262 - protein, 6 aa, ARTIFICIAL SEQUENCE
  Synthetic Construct
KKREFK

SEQ ID NO: 23263 - protein, 6 aa, ARTIFICIAL SEQUENCE
  Synthetic Construct
KKREGK

SEQ ID NO: 23264 - protein, 6 aa, ARTIFICIAL SEQUENCE
  Synthetic Construct
KKREHK

SEQ ID NO: 23265 - protein, 6 aa, ARTIFICIAL SEQUENCE
  Synthetic Construct
KKREIK

SEQ ID NO: 23266 - protein, 6 aa, ARTIFICIAL SEQUENCE
  Synthetic Construct
KKRELK

SEQ ID NO: 23267 - protein, 6 aa, ARTIFICIAL SEQUENCE
  Synthetic Construct
KKRENK

SEQ ID NO: 23268 - protein, 6 aa, ARTIFICIAL SEQUENCE
  Synthetic Construct
KKREQK

SEQ ID NO: 23269 - protein, 6 aa, ARTIFICIAL SEQUENCE
  Synthetic Construct
KKRERK

SEQ ID NO: 23270 - protein, 6 aa, ARTIFICIAL SEQUENCE
  Synthetic Construct
KKRESK

SEQ ID NO: 23271 - protein, 6 aa, ARTIFICIAL SEQUENCE
  Synthetic Construct
KKRETK

SEQ ID NO: 23272 - protein, 6 aa, ARTIFICIAL SEQUENCE
  Synthetic Construct
KKREYK

SEQ ID NO: 23273 - protein, 6 aa, ARTIFICIAL SEQUENCE
  Synthetic Construct
KKRFAK

SEQ ID NO: 23274 - protein, 6 aa, ARTIFICIAL SEQUENCE
  Synthetic Construct
KKRFDK

SEQ ID NO: 23275 - protein, 6 aa, ARTIFICIAL SEQUENCE
  Synthetic Construct
KKRFEK

SEQ ID NO: 23276 - protein, 6 aa, ARTIFICIAL SEQUENCE
  Synthetic Construct
KKRFFK

SEQ ID NO: 23277 - protein, 6 aa, ARTIFICIAL SEQUENCE
  Synthetic Construct
KKRFGK

SEQ ID NO: 23278 - protein, 6 aa, ARTIFICIAL SEQUENCE
  Synthetic Construct
KKRFHK

SEQ ID NO: 23279 - protein, 6 aa, ARTIFICIAL SEQUENCE
  Synthetic Construct
KKRFIK

SEQ ID NO: 23280 - protein, 6 aa, ARTIFICIAL SEQUENCE
  Synthetic Construct
KKRFLK

SEQ ID NO: 23281 - protein, 6 aa, ARTIFICIAL SEQUENCE
  Synthetic Construct
KKRFNK

SEQ ID NO: 23282 - protein, 6 aa, ARTIFICIAL SEQUENCE
  Synthetic Construct
KKRFQK

SEQ ID NO: 23283 - protein, 6 aa, ARTIFICIAL SEQUENCE
  Synthetic Construct
KKRFRK

SEQ ID NO: 23284 - protein, 6 aa, ARTIFICIAL SEQUENCE
  Synthetic Construct
KKRFSK

SEQ ID NO: 23285 - protein, 6 aa, ARTIFICIAL SEQUENCE
  Synthetic Construct
KKRFTK

SEQ ID NO: 23286 - protein, 6 aa, ARTIFICIAL SEQUENCE
  Synthetic Construct
KKRFYK

SEQ ID NO: 23287 - protein, 6 aa, ARTIFICIAL SEQUENCE
  Synthetic Construct
KKRGAK

SEQ ID NO: 23288 - protein, 6 aa, ARTIFICIAL SEQUENCE
  Synthetic Construct
KKRGDK

SEQ ID NO: 23289 - protein, 6 aa, ARTIFICIAL SEQUENCE
  Synthetic Construct
KKRGEK

SEQ ID NO: 23290 - protein, 6 aa, ARTIFICIAL SEQUENCE
  Synthetic Construct
KKRGFK

SEQ ID NO: 23291 - protein, 6 aa, ARTIFICIAL SEQUENCE
  Synthetic Construct
KKRGGK

SEQ ID NO: 23292 - protein, 6 aa, ARTIFICIAL SEQUENCE
  Synthetic Construct
KKRGHK

SEQ ID NO: 23293 - protein, 6 aa, ARTIFICIAL SEQUENCE
  Synthetic Construct
KKRGIK

SEQ ID NO: 23294 - protein, 6 aa, ARTIFICIAL SEQUENCE
  Synthetic Construct
KKRGLK

SEQ ID NO: 23295 - protein, 6 aa, ARTIFICIAL SEQUENCE
  Synthetic Construct
KKRGNK

SEQ ID NO: 23296 - protein, 6 aa, ARTIFICIAL SEQUENCE
  Synthetic Construct
KKRGQK

SEQ ID NO: 23297 - protein, 6 aa, ARTIFICIAL SEQUENCE
  Synthetic Construct
KKRGRK

SEQ ID NO: 23298 - protein, 6 aa, ARTIFICIAL SEQUENCE
  Synthetic Construct
KKRGSK

SEQ ID NO: 23299 - protein, 6 aa, ARTIFICIAL SEQUENCE
  Synthetic Construct
KKRGTK

SEQ ID NO: 23300 - protein, 6 aa, ARTIFICIAL SEQUENCE
  Synthetic Construct
KKRGYK

SEQ ID NO: 23301 - protein, 6 aa, ARTIFICIAL SEQUENCE
  Synthetic Construct
KKRHAK

SEQ ID NO: 23302 - protein, 6 aa, ARTIFICIAL SEQUENCE
  Synthetic Construct
KKRHDK

SEQ ID NO: 23303 - protein, 6 aa, ARTIFICIAL SEQUENCE
  Synthetic Construct
KKRHEK

SEQ ID NO: 23304 - protein, 6 aa, ARTIFICIAL SEQUENCE
  Synthetic Construct
KKRHFK

SEQ ID NO: 23305 - protein, 6 aa, ARTIFICIAL SEQUENCE
  Synthetic Construct
KKRHGK

SEQ ID NO: 23306 - protein, 6 aa, ARTIFICIAL SEQUENCE
  Synthetic Construct
KKRHHK

SEQ ID NO: 23307 - protein, 6 aa, ARTIFICIAL SEQUENCE
  Synthetic Construct
KKRHIK

SEQ ID NO: 23308 - protein, 6 aa, ARTIFICIAL SEQUENCE
  Synthetic Construct
KKRHLK

SEQ ID NO: 23309 - protein, 6 aa, ARTIFICIAL SEQUENCE
  Synthetic Construct
KKRHNK

SEQ ID NO: 23310 - protein, 6 aa, ARTIFICIAL SEQUENCE
  Synthetic Construct
KKRHQK

SEQ ID NO: 23311 - protein, 6 aa, ARTIFICIAL SEQUENCE
  Synthetic Construct
KKRHRK

SEQ ID NO: 23312 - protein, 6 aa, ARTIFICIAL SEQUENCE
  Synthetic Construct
KKRHSK

SEQ ID NO: 23313 - protein, 6 aa, ARTIFICIAL SEQUENCE
  Synthetic Construct
KKRHTK

SEQ ID NO: 23314 - protein, 6 aa, ARTIFICIAL SEQUENCE
  Synthetic Construct
KKRHYK

SEQ ID NO: 23315 - protein, 6 aa, ARTIFICIAL SEQUENCE
  Synthetic Construct
KKRIAK

SEQ ID NO: 23316 - protein, 6 aa, ARTIFICIAL SEQUENCE
  Synthetic Construct
KKRIDK

SEQ ID NO: 23317 - protein, 6 aa, ARTIFICIAL SEQUENCE
  Synthetic Construct
KKRIEK

SEQ ID NO: 23318 - protein, 6 aa, ARTIFICIAL SEQUENCE
  Synthetic Construct
KKRIFK

SEQ ID NO: 23319 - protein, 6 aa, ARTIFICIAL SEQUENCE
  Synthetic Construct
KKRIGK

SEQ ID NO: 23320 - protein, 6 aa, ARTIFICIAL SEQUENCE
  Synthetic Construct
KKRIHK

SEQ ID NO: 23321 - protein, 6 aa, ARTIFICIAL SEQUENCE
  Synthetic Construct
KKRIIK

SEQ ID NO: 23322 - protein, 6 aa, ARTIFICIAL SEQUENCE
  Synthetic Construct
KKRILK

SEQ ID NO: 23323 - protein, 6 aa, ARTIFICIAL SEQUENCE
  Synthetic Construct
KKRINK

SEQ ID NO: 23324 - protein, 6 aa, ARTIFICIAL SEQUENCE
  Synthetic Construct
KKRIQK

SEQ ID NO: 23325 - protein, 6 aa, ARTIFICIAL SEQUENCE
  Synthetic Construct
KKRIRK

SEQ ID NO: 23326 - protein, 6 aa, ARTIFICIAL SEQUENCE
  Synthetic Construct
KKRISK

SEQ ID NO: 23327 - protein, 6 aa, ARTIFICIAL SEQUENCE
  Synthetic Construct
KKRITK

SEQ ID NO: 23328 - protein, 6 aa, ARTIFICIAL SEQUENCE
  Synthetic Construct
KKRIYK

SEQ ID NO: 23329 - protein, 6 aa, ARTIFICIAL SEQUENCE
  Synthetic Construct
KKRLAK

SEQ ID NO: 23330 - protein, 6 aa, ARTIFICIAL SEQUENCE
  Synthetic Construct
KKRLDK

SEQ ID NO: 23331 - protein, 6 aa, ARTIFICIAL SEQUENCE
  Synthetic Construct
KKRLEK

SEQ ID NO: 23332 - protein, 6 aa, ARTIFICIAL SEQUENCE
  Synthetic Construct
KKRLFK

SEQ ID NO: 23333 - protein, 6 aa, ARTIFICIAL SEQUENCE
  Synthetic Construct
KKRLGK

SEQ ID NO: 23334 - protein, 6 aa, ARTIFICIAL SEQUENCE
  Synthetic Construct
KKRLHK

SEQ ID NO: 23335 - protein, 6 aa, ARTIFICIAL SEQUENCE
  Synthetic Construct
KKRLIK

SEQ ID NO: 23336 - protein, 6 aa, ARTIFICIAL SEQUENCE
  Synthetic Construct
KKRLLK

SEQ ID NO: 23337 - protein, 6 aa, ARTIFICIAL SEQUENCE
  Synthetic Construct
KKRLNK

SEQ ID NO: 23338 - protein, 6 aa, ARTIFICIAL SEQUENCE
  Synthetic Construct
KKRLQK

SEQ ID NO: 23339 - protein, 6 aa, ARTIFICIAL SEQUENCE
  Synthetic Construct
KKRLRK

SEQ ID NO: 23340 - protein, 6 aa, ARTIFICIAL SEQUENCE
  Synthetic Construct
KKRLSK

SEQ ID NO: 23341 - protein, 6 aa, ARTIFICIAL SEQUENCE
  Synthetic Construct
KKRLTK

SEQ ID NO: 23342 - protein, 6 aa, ARTIFICIAL SEQUENCE
  Synthetic Construct
KKRLYK

SEQ ID NO: 23343 - protein, 6 aa, ARTIFICIAL SEQUENCE
  Synthetic Construct
KKRNAK

SEQ ID NO: 23344 - protein, 6 aa, ARTIFICIAL SEQUENCE
  Synthetic Construct
KKRNDK

SEQ ID NO: 23345 - protein, 6 aa, ARTIFICIAL SEQUENCE
  Synthetic Construct
KKRNEK

SEQ ID NO: 23346 - protein, 6 aa, ARTIFICIAL SEQUENCE
  Synthetic Construct
KKRNFK

SEQ ID NO: 23347 - protein, 6 aa, ARTIFICIAL SEQUENCE
  Synthetic Construct
KKRNGK

SEQ ID NO: 23348 - protein, 6 aa, ARTIFICIAL SEQUENCE
  Synthetic Construct
KKRNHK

SEQ ID NO: 23349 - protein, 6 aa, ARTIFICIAL SEQUENCE
  Synthetic Construct
KKRNIK

SEQ ID NO: 23350 - protein, 6 aa, ARTIFICIAL SEQUENCE
  Synthetic Construct
KKRNLK

SEQ ID NO: 23351 - protein, 6 aa, ARTIFICIAL SEQUENCE
  Synthetic Construct
KKRNNK

SEQ ID NO: 23352 - protein, 6 aa, ARTIFICIAL SEQUENCE
  Synthetic Construct
KKRNQK

SEQ ID NO: 23353 - protein, 6 aa, ARTIFICIAL SEQUENCE
  Synthetic Construct
KKRNRK

SEQ ID NO: 23354 - protein, 6 aa, ARTIFICIAL SEQUENCE
  Synthetic Construct
KKRNSK

SEQ ID NO: 23355 - protein, 6 aa, ARTIFICIAL SEQUENCE
  Synthetic Construct
KKRNTK

SEQ ID NO: 23356 - protein, 6 aa, ARTIFICIAL SEQUENCE
  Synthetic Construct
KKRNYK

SEQ ID NO: 23357 - protein, 6 aa, ARTIFICIAL SEQUENCE
  Synthetic Construct
KKRQAK

SEQ ID NO: 23358 - protein, 6 aa, ARTIFICIAL SEQUENCE
  Synthetic Construct
KKRQDK

SEQ ID NO: 23359 - protein, 6 aa, ARTIFICIAL SEQUENCE
  Synthetic Construct
KKRQEK

SEQ ID NO: 23360 - protein, 6 aa, ARTIFICIAL SEQUENCE
  Synthetic Construct
KKRQFK

SEQ ID NO: 23361 - protein, 6 aa, ARTIFICIAL SEQUENCE
  Synthetic Construct
KKRQGK

SEQ ID NO: 23362 - protein, 6 aa, ARTIFICIAL SEQUENCE
  Synthetic Construct
KKRQHK

SEQ ID NO: 23363 - protein, 6 aa, ARTIFICIAL SEQUENCE
  Synthetic Construct
KKRQIK

SEQ ID NO: 23364 - protein, 6 aa, ARTIFICIAL SEQUENCE
  Synthetic Construct
KKRQLK

SEQ ID NO: 23365 - protein, 6 aa, ARTIFICIAL SEQUENCE
  Synthetic Construct
KKRQNK

SEQ ID NO: 23366 - protein, 6 aa, ARTIFICIAL SEQUENCE
  Synthetic Construct
KKRQQK

SEQ ID NO: 23367 - protein, 6 aa, ARTIFICIAL SEQUENCE
  Synthetic Construct
KKRQRK

SEQ ID NO: 23368 - protein, 6 aa, ARTIFICIAL SEQUENCE
  Synthetic Construct
KKRQSK

SEQ ID NO: 23369 - protein, 6 aa, ARTIFICIAL SEQUENCE
  Synthetic Construct
KKRQTK

SEQ ID NO: 23370 - protein, 6 aa, ARTIFICIAL SEQUENCE
  Synthetic Construct
KKRQYK

SEQ ID NO: 23371 - protein, 6 aa, ARTIFICIAL SEQUENCE
  Synthetic Construct
KKRRAK

SEQ ID NO: 23372 - protein, 6 aa, ARTIFICIAL SEQUENCE
  Synthetic Construct
KKRRDK

SEQ ID NO: 23373 - protein, 6 aa, ARTIFICIAL SEQUENCE
  Synthetic Construct
KKRREK

SEQ ID NO: 23374 - protein, 6 aa, ARTIFICIAL SEQUENCE
  Synthetic Construct
KKRRFK

SEQ ID NO: 23375 - protein, 6 aa, ARTIFICIAL SEQUENCE
  Synthetic Construct
KKRRGK

SEQ ID NO: 23376 - protein, 6 aa, ARTIFICIAL SEQUENCE
  Synthetic Construct
KKRRHK

SEQ ID NO: 23377 - protein, 6 aa, ARTIFICIAL SEQUENCE
  Synthetic Construct
KKRRIK

SEQ ID NO: 23378 - protein, 6 aa, ARTIFICIAL SEQUENCE
  Synthetic Construct
KKRRLK

SEQ ID NO: 23379 - protein, 6 aa, ARTIFICIAL SEQUENCE
  Synthetic Construct
KKRRNK

SEQ ID NO: 23380 - protein, 6 aa, ARTIFICIAL SEQUENCE
  Synthetic Construct
KKRRQK

SEQ ID NO: 23381 - protein, 6 aa, ARTIFICIAL SEQUENCE
  Synthetic Construct
KKRRRK

SEQ ID NO: 23382 - protein, 6 aa, ARTIFICIAL SEQUENCE
  Synthetic Construct
KKRRSK

SEQ ID NO: 23383 - protein, 6 aa, ARTIFICIAL SEQUENCE
  Synthetic Construct
KKRRTK

SEQ ID NO: 23384 - protein, 6 aa, ARTIFICIAL SEQUENCE
  Synthetic Construct
KKRRYK

SEQ ID NO: 23385 - protein, 6 aa, ARTIFICIAL SEQUENCE
  Synthetic Construct
KKRSAK

SEQ ID NO: 23386 - protein, 6 aa, ARTIFICIAL SEQUENCE
  Synthetic Construct
KKRSDK

SEQ ID NO: 23387 - protein, 6 aa, ARTIFICIAL SEQUENCE
  Synthetic Construct
KKRSEK

SEQ ID NO: 23388 - protein, 6 aa, ARTIFICIAL SEQUENCE
  Synthetic Construct
KKRSFK

SEQ ID NO: 23389 - protein, 6 aa, ARTIFICIAL SEQUENCE
  Synthetic Construct
KKRSGK

SEQ ID NO: 23390 - protein, 6 aa, ARTIFICIAL SEQUENCE
  Synthetic Construct
KKRSHK

SEQ ID NO: 23391 - protein, 6 aa, ARTIFICIAL SEQUENCE
  Synthetic Construct
KKRSIK

SEQ ID NO: 23392 - protein, 6 aa, ARTIFICIAL SEQUENCE
  Synthetic Construct
KKRSLK

SEQ ID NO: 23393 - protein, 6 aa, ARTIFICIAL SEQUENCE
  Synthetic Construct
KKRSNK

SEQ ID NO: 23394 - protein, 6 aa, ARTIFICIAL SEQUENCE
  Synthetic Construct
KKRSQK

SEQ ID NO: 23395 - protein, 6 aa, ARTIFICIAL SEQUENCE
  Synthetic Construct
KKRSRK

SEQ ID NO: 23396 - protein, 6 aa, ARTIFICIAL SEQUENCE
  Synthetic Construct
KKRSSK

SEQ ID NO: 23397 - protein, 6 aa, ARTIFICIAL SEQUENCE
  Synthetic Construct
KKRSTK

SEQ ID NO: 23398 - protein, 6 aa, ARTIFICIAL SEQUENCE
  Synthetic Construct
KKRSYK

SEQ ID NO: 23399 - protein, 6 aa, ARTIFICIAL SEQUENCE
  Synthetic Construct
KKRTAK

SEQ ID NO: 23400 - protein, 6 aa, ARTIFICIAL SEQUENCE
  Synthetic Construct
KKRTDK

SEQ ID NO: 23401 - protein, 6 aa, ARTIFICIAL SEQUENCE
  Synthetic Construct
KKRTEK

SEQ ID NO: 23402 - protein, 6 aa, ARTIFICIAL SEQUENCE
  Synthetic Construct
KKRTFK

SEQ ID NO: 23403 - protein, 6 aa, ARTIFICIAL SEQUENCE
  Synthetic Construct
KKRTGK

SEQ ID NO: 23404 - protein, 6 aa, ARTIFICIAL SEQUENCE
  Synthetic Construct
KKRTHK

SEQ ID NO: 23405 - protein, 6 aa, ARTIFICIAL SEQUENCE
  Synthetic Construct
KKRTIK

SEQ ID NO: 23406 - protein, 6 aa, ARTIFICIAL SEQUENCE
  Synthetic Construct
KKRTLK

SEQ ID NO: 23407 - protein, 6 aa, ARTIFICIAL SEQUENCE
  Synthetic Construct
KKRTNK

SEQ ID NO: 23408 - protein, 6 aa, ARTIFICIAL SEQUENCE
  Synthetic Construct
KKRTQK

SEQ ID NO: 23409 - protein, 6 aa, ARTIFICIAL SEQUENCE
  Synthetic Construct
KKRTRK

SEQ ID NO: 23410 - protein, 6 aa, ARTIFICIAL SEQUENCE
  Synthetic Construct
KKRTSK

SEQ ID NO: 23411 - protein, 6 aa, ARTIFICIAL SEQUENCE
  Synthetic Construct
KKRTTK

SEQ ID NO: 23412 - protein, 6 aa, ARTIFICIAL SEQUENCE
  Synthetic Construct
KKRTYK

SEQ ID NO: 23413 - protein, 6 aa, ARTIFICIAL SEQUENCE
  Synthetic Construct
KKRYAK

SEQ ID NO: 23414 - protein, 6 aa, ARTIFICIAL SEQUENCE
  Synthetic Construct
KKRYDK

SEQ ID NO: 23415 - protein, 6 aa, ARTIFICIAL SEQUENCE
  Synthetic Construct
KKRYEK

SEQ ID NO: 23416 - protein, 6 aa, ARTIFICIAL SEQUENCE
  Synthetic Construct
KKRYFK

SEQ ID NO: 23417 - protein, 6 aa, ARTIFICIAL SEQUENCE
  Synthetic Construct
KKRYGK

SEQ ID NO: 23418 - protein, 6 aa, ARTIFICIAL SEQUENCE
  Synthetic Construct
KKRYHK

SEQ ID NO: 23419 - protein, 6 aa, ARTIFICIAL SEQUENCE
  Synthetic Construct
KKRYIK

SEQ ID NO: 23420 - protein, 6 aa, ARTIFICIAL SEQUENCE
  Synthetic Construct
KKRYLK

SEQ ID NO: 23421 - protein, 6 aa, ARTIFICIAL SEQUENCE
  Synthetic Construct
KKRYNK

SEQ ID NO: 23422 - protein, 6 aa, ARTIFICIAL SEQUENCE
  Synthetic Construct
KKRYQK

SEQ ID NO: 23423 - protein, 6 aa, ARTIFICIAL SEQUENCE
  Synthetic Construct
KKRYRK

SEQ ID NO: 23424 - protein, 6 aa, ARTIFICIAL SEQUENCE
  Synthetic Construct
KKRYSK

SEQ ID NO: 23425 - protein, 6 aa, ARTIFICIAL SEQUENCE
  Synthetic Construct
KKRYTK

SEQ ID NO: 23426 - protein, 6 aa, ARTIFICIAL SEQUENCE
  Synthetic Construct
KKRYYK

SEQ ID NO: 23427 - protein, 6 aa, ARTIFICIAL SEQUENCE
  Synthetic Construct
KKSAAK

SEQ ID NO: 23428 - protein, 6 aa, ARTIFICIAL SEQUENCE
  Synthetic Construct
KKSADK

SEQ ID NO: 23429 - protein, 6 aa, ARTIFICIAL SEQUENCE
  Synthetic Construct
KKSAEK

SEQ ID NO: 23430 - protein, 6 aa, ARTIFICIAL SEQUENCE
  Synthetic Construct
KKSAFK

SEQ ID NO: 23431 - protein, 6 aa, ARTIFICIAL SEQUENCE
  Synthetic Construct
KKSAGK

SEQ ID NO: 23432 - protein, 6 aa, ARTIFICIAL SEQUENCE
  Synthetic Construct
KKSAHK

SEQ ID NO: 23433 - protein, 6 aa, ARTIFICIAL SEQUENCE
  Synthetic Construct
KKSAIK

SEQ ID NO: 23434 - protein, 6 aa, ARTIFICIAL SEQUENCE
  Synthetic Construct
KKSALK

SEQ ID NO: 23435 - protein, 6 aa, ARTIFICIAL SEQUENCE
  Synthetic Construct
KKSANK

SEQ ID NO: 23436 - protein, 6 aa, ARTIFICIAL SEQUENCE
  Synthetic Construct
KKSAQK

SEQ ID NO: 23437 - protein, 6 aa, ARTIFICIAL SEQUENCE
  Synthetic Construct
KKSARK

SEQ ID NO: 23438 - protein, 6 aa, ARTIFICIAL SEQUENCE
  Synthetic Construct
KKSASK

SEQ ID NO: 23439 - protein, 6 aa, ARTIFICIAL SEQUENCE
  Synthetic Construct
KKSATK

SEQ ID NO: 23440 - protein, 6 aa, ARTIFICIAL SEQUENCE
  Synthetic Construct
KKSAYK

SEQ ID NO: 23441 - protein, 6 aa, ARTIFICIAL SEQUENCE
  Synthetic Construct
KKSDAK

SEQ ID NO: 23442 - protein, 6 aa, ARTIFICIAL SEQUENCE
  Synthetic Construct
KKSDDK

SEQ ID NO: 23443 - protein, 6 aa, ARTIFICIAL SEQUENCE
  Synthetic Construct
KKSDEK

SEQ ID NO: 23444 - protein, 6 aa, ARTIFICIAL SEQUENCE
  Synthetic Construct
KKSDFK

SEQ ID NO: 23445 - protein, 6 aa, ARTIFICIAL SEQUENCE
  Synthetic Construct
KKSDGK

SEQ ID NO: 23446 - protein, 6 aa, ARTIFICIAL SEQUENCE
  Synthetic Construct
KKSDHK

SEQ ID NO: 23447 - protein, 6 aa, ARTIFICIAL SEQUENCE
  Synthetic Construct
KKSDIK

SEQ ID NO: 23448 - protein, 6 aa, ARTIFICIAL SEQUENCE
  Synthetic Construct
KKSDLK

SEQ ID NO: 23449 - protein, 6 aa, ARTIFICIAL SEQUENCE
  Synthetic Construct
KKSDNK

SEQ ID NO: 23450 - protein, 6 aa, ARTIFICIAL SEQUENCE
  Synthetic Construct
KKSDQK

SEQ ID NO: 23451 - protein, 6 aa, ARTIFICIAL SEQUENCE
  Synthetic Construct
KKSDRK

SEQ ID NO: 23452 - protein, 6 aa, ARTIFICIAL SEQUENCE
  Synthetic Construct
KKSDSK

SEQ ID NO: 23453 - protein, 6 aa, ARTIFICIAL SEQUENCE
  Synthetic Construct
KKSDTK

SEQ ID NO: 23454 - protein, 6 aa, ARTIFICIAL SEQUENCE
  Synthetic Construct
KKSDYK

SEQ ID NO: 23455 - protein, 6 aa, ARTIFICIAL SEQUENCE
  Synthetic Construct
KKSEAK

SEQ ID NO: 23456 - protein, 6 aa, ARTIFICIAL SEQUENCE
  Synthetic Construct
KKSEDK

SEQ ID NO: 23457 - protein, 6 aa, ARTIFICIAL SEQUENCE
  Synthetic Construct
KKSEEK

SEQ ID NO: 23458 - protein, 6 aa, ARTIFICIAL SEQUENCE
  Synthetic Construct
KKSEFK

SEQ ID NO: 23459 - protein, 6 aa, ARTIFICIAL SEQUENCE
  Synthetic Construct
KKSEGK

SEQ ID NO: 23460 - protein, 6 aa, ARTIFICIAL SEQUENCE
  Synthetic Construct
KKSEHK

SEQ ID NO: 23461 - protein, 6 aa, ARTIFICIAL SEQUENCE
  Synthetic Construct
KKSEIK

SEQ ID NO: 23462 - protein, 6 aa, ARTIFICIAL SEQUENCE
  Synthetic Construct
KKSELK

SEQ ID NO: 23463 - protein, 6 aa, ARTIFICIAL SEQUENCE
  Synthetic Construct
KKSENK

SEQ ID NO: 23464 - protein, 6 aa, ARTIFICIAL SEQUENCE
  Synthetic Construct
KKSEQK

SEQ ID NO: 23465 - protein, 6 aa, ARTIFICIAL SEQUENCE
  Synthetic Construct
KKSERK

SEQ ID NO: 23466 - protein, 6 aa, ARTIFICIAL SEQUENCE
  Synthetic Construct
KKSESK

SEQ ID NO: 23467 - protein, 6 aa, ARTIFICIAL SEQUENCE
  Synthetic Construct
KKSETK

SEQ ID NO: 23468 - protein, 6 aa, ARTIFICIAL SEQUENCE
  Synthetic Construct
KKSEYK

SEQ ID NO: 23469 - protein, 6 aa, ARTIFICIAL SEQUENCE
  Synthetic Construct
KKSFAK

SEQ ID NO: 23470 - protein, 6 aa, ARTIFICIAL SEQUENCE
  Synthetic Construct
KKSFDK

SEQ ID NO: 23471 - protein, 6 aa, ARTIFICIAL SEQUENCE
  Synthetic Construct
KKSFEK

SEQ ID NO: 23472 - protein, 6 aa, ARTIFICIAL SEQUENCE
  Synthetic Construct
KKSFFK

SEQ ID NO: 23473 - protein, 6 aa, ARTIFICIAL SEQUENCE
  Synthetic Construct
KKSFGK

SEQ ID NO: 23474 - protein, 6 aa, ARTIFICIAL SEQUENCE
  Synthetic Construct
KKSFHK

SEQ ID NO: 23475 - protein, 6 aa, ARTIFICIAL SEQUENCE
  Synthetic Construct
KKSFIK

SEQ ID NO: 23476 - protein, 6 aa, ARTIFICIAL SEQUENCE
  Synthetic Construct
KKSFLK

SEQ ID NO: 23477 - protein, 6 aa, ARTIFICIAL SEQUENCE
  Synthetic Construct
KKSFNK

SEQ ID NO: 23478 - protein, 6 aa, ARTIFICIAL SEQUENCE
  Synthetic Construct
KKSFQK

SEQ ID NO: 23479 - protein, 6 aa, ARTIFICIAL SEQUENCE
  Synthetic Construct
KKSFRK

SEQ ID NO: 23480 - protein, 6 aa, ARTIFICIAL SEQUENCE
  Synthetic Construct
KKSFSK

SEQ ID NO: 23481 - protein, 6 aa, ARTIFICIAL SEQUENCE
  Synthetic Construct
KKSFTK

SEQ ID NO: 23482 - protein, 6 aa, ARTIFICIAL SEQUENCE
  Synthetic Construct
KKSFYK

SEQ ID NO: 23483 - protein, 6 aa, ARTIFICIAL SEQUENCE
  Synthetic Construct
KKSGAK

SEQ ID NO: 23484 - protein, 6 aa, ARTIFICIAL SEQUENCE
  Synthetic Construct
KKSGDK

SEQ ID NO: 23485 - protein, 6 aa, ARTIFICIAL SEQUENCE
  Synthetic Construct
KKSGEK

SEQ ID NO: 23486 - protein, 6 aa, ARTIFICIAL SEQUENCE
  Synthetic Construct
KKSGFK

SEQ ID NO: 23487 - protein, 6 aa, ARTIFICIAL SEQUENCE
  Synthetic Construct
KKSGGK

SEQ ID NO: 23488 - protein, 6 aa, ARTIFICIAL SEQUENCE
  Synthetic Construct
KKSGHK

SEQ ID NO: 23489 - protein, 6 aa, ARTIFICIAL SEQUENCE
  Synthetic Construct
KKSGIK

SEQ ID NO: 23490 - protein, 6 aa, ARTIFICIAL SEQUENCE
  Synthetic Construct
KKSGLK

SEQ ID NO: 23491 - protein, 6 aa, ARTIFICIAL SEQUENCE
  Synthetic Construct
KKSGNK

SEQ ID NO: 23492 - protein, 6 aa, ARTIFICIAL SEQUENCE
  Synthetic Construct
KKSGQK

SEQ ID NO: 23493 - protein, 6 aa, ARTIFICIAL SEQUENCE
  Synthetic Construct
KKSGRK

SEQ ID NO: 23494 - protein, 6 aa, ARTIFICIAL SEQUENCE
  Synthetic Construct
KKSGSK

SEQ ID NO: 23495 - protein, 6 aa, ARTIFICIAL SEQUENCE
  Synthetic Construct
KKSGTK

SEQ ID NO: 23496 - protein, 6 aa, ARTIFICIAL SEQUENCE
  Synthetic Construct
KKSGYK

SEQ ID NO: 23497 - protein, 6 aa, ARTIFICIAL SEQUENCE
  Synthetic Construct
KKSHAK

SEQ ID NO: 23498 - protein, 6 aa, ARTIFICIAL SEQUENCE
  Synthetic Construct
KKSHDK

SEQ ID NO: 23499 - protein, 6 aa, ARTIFICIAL SEQUENCE
  Synthetic Construct
KKSHEK

SEQ ID NO: 23500 - protein, 6 aa, ARTIFICIAL SEQUENCE
  Synthetic Construct
KKSHFK

SEQ ID NO: 23501 - protein, 6 aa, ARTIFICIAL SEQUENCE
  Synthetic Construct
KKSHGK

SEQ ID NO: 23502 - protein, 6 aa, ARTIFICIAL SEQUENCE
  Synthetic Construct
KKSHHK

SEQ ID NO: 23503 - protein, 6 aa, ARTIFICIAL SEQUENCE
  Synthetic Construct
KKSHIK

SEQ ID NO: 23504 - protein, 6 aa, ARTIFICIAL SEQUENCE
  Synthetic Construct
KKSHLK

SEQ ID NO: 23505 - protein, 6 aa, ARTIFICIAL SEQUENCE
  Synthetic Construct
KKSHNK

SEQ ID NO: 23506 - protein, 6 aa, ARTIFICIAL SEQUENCE
  Synthetic Construct
KKSHQK

SEQ ID NO: 23507 - protein, 6 aa, ARTIFICIAL SEQUENCE
  Synthetic Construct
KKSHRK

SEQ ID NO: 23508 - protein, 6 aa, ARTIFICIAL SEQUENCE
  Synthetic Construct
KKSHSK

SEQ ID NO: 23509 - protein, 6 aa, ARTIFICIAL SEQUENCE
  Synthetic Construct
KKSHTK

SEQ ID NO: 23510 - protein, 6 aa, ARTIFICIAL SEQUENCE
  Synthetic Construct
KKSHYK

SEQ ID NO: 23511 - protein, 6 aa, ARTIFICIAL SEQUENCE
  Synthetic Construct
KKSIAK

SEQ ID NO: 23512 - protein, 6 aa, ARTIFICIAL SEQUENCE
  Synthetic Construct
KKSIDK

SEQ ID NO: 23513 - protein, 6 aa, ARTIFICIAL SEQUENCE
  Synthetic Construct
KKSIEK

SEQ ID NO: 23514 - protein, 6 aa, ARTIFICIAL SEQUENCE
  Synthetic Construct
KKSIFK

SEQ ID NO: 23515 - protein, 6 aa, ARTIFICIAL SEQUENCE
  Synthetic Construct
KKSIGK

SEQ ID NO: 23516 - protein, 6 aa, ARTIFICIAL SEQUENCE
  Synthetic Construct
KKSIHK

SEQ ID NO: 23517 - protein, 6 aa, ARTIFICIAL SEQUENCE
  Synthetic Construct
KKSIIK

SEQ ID NO: 23518 - protein, 6 aa, ARTIFICIAL SEQUENCE
  Synthetic Construct
KKSILK

SEQ ID NO: 23519 - protein, 6 aa, ARTIFICIAL SEQUENCE
  Synthetic Construct
KKSINK

SEQ ID NO: 23520 - protein, 6 aa, ARTIFICIAL SEQUENCE
  Synthetic Construct
KKSIQK

SEQ ID NO: 23521 - protein, 6 aa, ARTIFICIAL SEQUENCE
  Synthetic Construct
KKSIRK

SEQ ID NO: 23522 - protein, 6 aa, ARTIFICIAL SEQUENCE
  Synthetic Construct
KKSISK

SEQ ID NO: 23523 - protein, 6 aa, ARTIFICIAL SEQUENCE
  Synthetic Construct
KKSITK

SEQ ID NO: 23524 - protein, 6 aa, ARTIFICIAL SEQUENCE
  Synthetic Construct
KKSIYK

SEQ ID NO: 23525 - protein, 6 aa, ARTIFICIAL SEQUENCE
  Synthetic Construct
KKSLAK

SEQ ID NO: 23526 - protein, 6 aa, ARTIFICIAL SEQUENCE
  Synthetic Construct
KKSLDK

SEQ ID NO: 23527 - protein, 6 aa, ARTIFICIAL SEQUENCE
  Synthetic Construct
KKSLEK

SEQ ID NO: 23528 - protein, 6 aa, ARTIFICIAL SEQUENCE
  Synthetic Construct
KKSLFK

SEQ ID NO: 23529 - protein, 6 aa, ARTIFICIAL SEQUENCE
  Synthetic Construct
KKSLGK

SEQ ID NO: 23530 - protein, 6 aa, ARTIFICIAL SEQUENCE
  Synthetic Construct
KKSLHK

SEQ ID NO: 23531 - protein, 6 aa, ARTIFICIAL SEQUENCE
  Synthetic Construct
KKSLIK

SEQ ID NO: 23532 - protein, 6 aa, ARTIFICIAL SEQUENCE
  Synthetic Construct
KKSLLK

SEQ ID NO: 23533 - protein, 6 aa, ARTIFICIAL SEQUENCE
  Synthetic Construct
KKSLNK

SEQ ID NO: 23534 - protein, 6 aa, ARTIFICIAL SEQUENCE
  Synthetic Construct
KKSLQK

SEQ ID NO: 23535 - protein, 6 aa, ARTIFICIAL SEQUENCE
  Synthetic Construct
KKSLRK

SEQ ID NO: 23536 - protein, 6 aa, ARTIFICIAL SEQUENCE
  Synthetic Construct
KKSLSK

SEQ ID NO: 23537 - protein, 6 aa, ARTIFICIAL SEQUENCE
  Synthetic Construct
KKSLTK

SEQ ID NO: 23538 - protein, 6 aa, ARTIFICIAL SEQUENCE
  Synthetic Construct
KKSLYK

SEQ ID NO: 23539 - protein, 6 aa, ARTIFICIAL SEQUENCE
  Synthetic Construct
KKSNAK

SEQ ID NO: 23540 - protein, 6 aa, ARTIFICIAL SEQUENCE
  Synthetic Construct
KKSNDK

SEQ ID NO: 23541 - protein, 6 aa, ARTIFICIAL SEQUENCE
  Synthetic Construct
KKSNEK

SEQ ID NO: 23542 - protein, 6 aa, ARTIFICIAL SEQUENCE
  Synthetic Construct
KKSNFK

SEQ ID NO: 23543 - protein, 6 aa, ARTIFICIAL SEQUENCE
  Synthetic Construct
KKSNGK

SEQ ID NO: 23544 - protein, 6 aa, ARTIFICIAL SEQUENCE
  Synthetic Construct
KKSNHK

SEQ ID NO: 23545 - protein, 6 aa, ARTIFICIAL SEQUENCE
  Synthetic Construct
KKSNIK

SEQ ID NO: 23546 - protein, 6 aa, ARTIFICIAL SEQUENCE
  Synthetic Construct
KKSNLK

SEQ ID NO: 23547 - protein, 6 aa, ARTIFICIAL SEQUENCE
  Synthetic Construct
KKSNNK

SEQ ID NO: 23548 - protein, 6 aa, ARTIFICIAL SEQUENCE
  Synthetic Construct
KKSNQK

SEQ ID NO: 23549 - protein, 6 aa, ARTIFICIAL SEQUENCE
  Synthetic Construct
KKSNRK

SEQ ID NO: 23550 - protein, 6 aa, ARTIFICIAL SEQUENCE
  Synthetic Construct
KKSNSK

SEQ ID NO: 23551 - protein, 6 aa, ARTIFICIAL SEQUENCE
  Synthetic Construct
KKSNTK

SEQ ID NO: 23552 - protein, 6 aa, ARTIFICIAL SEQUENCE
  Synthetic Construct
KKSNYK

SEQ ID NO: 23553 - protein, 6 aa, ARTIFICIAL SEQUENCE
  Synthetic Construct
KKSQAK

SEQ ID NO: 23554 - protein, 6 aa, ARTIFICIAL SEQUENCE
  Synthetic Construct
KKSQDK

SEQ ID NO: 23555 - protein, 6 aa, ARTIFICIAL SEQUENCE
  Synthetic Construct
KKSQEK

SEQ ID NO: 23556 - protein, 6 aa, ARTIFICIAL SEQUENCE
  Synthetic Construct
KKSQFK

SEQ ID NO: 23557 - protein, 6 aa, ARTIFICIAL SEQUENCE
  Synthetic Construct
KKSQGK

SEQ ID NO: 23558 - protein, 6 aa, ARTIFICIAL SEQUENCE
  Synthetic Construct
KKSQHK

SEQ ID NO: 23559 - protein, 6 aa, ARTIFICIAL SEQUENCE
  Synthetic Construct
KKSQIK

SEQ ID NO: 23560 - protein, 6 aa, ARTIFICIAL SEQUENCE
  Synthetic Construct
KKSQLK

SEQ ID NO: 23561 - protein, 6 aa, ARTIFICIAL SEQUENCE
  Synthetic Construct
KKSQNK

SEQ ID NO: 23562 - protein, 6 aa, ARTIFICIAL SEQUENCE
  Synthetic Construct
KKSQQK

SEQ ID NO: 23563 - protein, 6 aa, ARTIFICIAL SEQUENCE
  Synthetic Construct
KKSQRK

SEQ ID NO: 23564 - protein, 6 aa, ARTIFICIAL SEQUENCE
  Synthetic Construct
KKSQSK

SEQ ID NO: 23565 - protein, 6 aa, ARTIFICIAL SEQUENCE
  Synthetic Construct
KKSQTK

SEQ ID NO: 23566 - protein, 6 aa, ARTIFICIAL SEQUENCE
  Synthetic Construct
KKSQYK

SEQ ID NO: 23567 - protein, 6 aa, ARTIFICIAL SEQUENCE
  Synthetic Construct
KKSRAK

SEQ ID NO: 23568 - protein, 6 aa, ARTIFICIAL SEQUENCE
  Synthetic Construct
KKSRDK

SEQ ID NO: 23569 - protein, 6 aa, ARTIFICIAL SEQUENCE
  Synthetic Construct
KKSREK

SEQ ID NO: 23570 - protein, 6 aa, ARTIFICIAL SEQUENCE
  Synthetic Construct
KKSRFK

SEQ ID NO: 23571 - protein, 6 aa, ARTIFICIAL SEQUENCE
  Synthetic Construct
KKSRGK

SEQ ID NO: 23572 - protein, 6 aa, ARTIFICIAL SEQUENCE
  Synthetic Construct
KKSRHK

SEQ ID NO: 23573 - protein, 6 aa, ARTIFICIAL SEQUENCE
  Synthetic Construct
KKSRIK

SEQ ID NO: 23574 - protein, 6 aa, ARTIFICIAL SEQUENCE
  Synthetic Construct
KKSRLK

SEQ ID NO: 23575 - protein, 6 aa, ARTIFICIAL SEQUENCE
  Synthetic Construct
KKSRNK

SEQ ID NO: 23576 - protein, 6 aa, ARTIFICIAL SEQUENCE
  Synthetic Construct
KKSRQK

SEQ ID NO: 23577 - protein, 6 aa, ARTIFICIAL SEQUENCE
  Synthetic Construct
KKSRRK

SEQ ID NO: 23578 - protein, 6 aa, ARTIFICIAL SEQUENCE
  Synthetic Construct
KKSRSK

SEQ ID NO: 23579 - protein, 6 aa, ARTIFICIAL SEQUENCE
  Synthetic Construct
KKSRTK

SEQ ID NO: 23580 - protein, 6 aa, ARTIFICIAL SEQUENCE
  Synthetic Construct
KKSRYK

SEQ ID NO: 23581 - protein, 6 aa, ARTIFICIAL SEQUENCE
  Synthetic Construct
KKSSAK

SEQ ID NO: 23582 - protein, 6 aa, ARTIFICIAL SEQUENCE
  Synthetic Construct
KKSSDK

SEQ ID NO: 23583 - protein, 6 aa, ARTIFICIAL SEQUENCE
  Synthetic Construct
KKSSEK

SEQ ID NO: 23584 - protein, 6 aa, ARTIFICIAL SEQUENCE
  Synthetic Construct
KKSSFK

SEQ ID NO: 23585 - protein, 6 aa, ARTIFICIAL SEQUENCE
  Synthetic Construct
KKSSGK

SEQ ID NO: 23586 - protein, 6 aa, ARTIFICIAL SEQUENCE
  Synthetic Construct
KKSSHK

SEQ ID NO: 23587 - protein, 6 aa, ARTIFICIAL SEQUENCE
  Synthetic Construct
KKSSIK

SEQ ID NO: 23588 - protein, 6 aa, ARTIFICIAL SEQUENCE
  Synthetic Construct
KKSSLK

SEQ ID NO: 23589 - protein, 6 aa, ARTIFICIAL SEQUENCE
  Synthetic Construct
KKSSNK

SEQ ID NO: 23590 - protein, 6 aa, ARTIFICIAL SEQUENCE
  Synthetic Construct
KKSSQK

SEQ ID NO: 23591 - protein, 6 aa, ARTIFICIAL SEQUENCE
  Synthetic Construct
KKSSRK

SEQ ID NO: 23592 - protein, 6 aa, ARTIFICIAL SEQUENCE
  Synthetic Construct
KKSSSK

SEQ ID NO: 23593 - protein, 6 aa, ARTIFICIAL SEQUENCE
  Synthetic Construct
KKSSTK

SEQ ID NO: 23594 - protein, 6 aa, ARTIFICIAL SEQUENCE
  Synthetic Construct
KKSSYK

SEQ ID NO: 23595 - protein, 6 aa, ARTIFICIAL SEQUENCE
  Synthetic Construct
KKSTAK

SEQ ID NO: 23596 - protein, 6 aa, ARTIFICIAL SEQUENCE
  Synthetic Construct
KKSTDK

SEQ ID NO: 23597 - protein, 6 aa, ARTIFICIAL SEQUENCE
  Synthetic Construct
KKSTEK

SEQ ID NO: 23598 - protein, 6 aa, ARTIFICIAL SEQUENCE
  Synthetic Construct
KKSTFK

SEQ ID NO: 23599 - protein, 6 aa, ARTIFICIAL SEQUENCE
  Synthetic Construct
KKSTGK

SEQ ID NO: 23600 - protein, 6 aa, ARTIFICIAL SEQUENCE
  Synthetic Construct
KKSTHK

SEQ ID NO: 23601 - protein, 6 aa, ARTIFICIAL SEQUENCE
  Synthetic Construct
KKSTIK

SEQ ID NO: 23602 - protein, 6 aa, ARTIFICIAL SEQUENCE
  Synthetic Construct
KKSTLK

SEQ ID NO: 23603 - protein, 6 aa, ARTIFICIAL SEQUENCE
  Synthetic Construct
KKSTNK

SEQ ID NO: 23604 - protein, 6 aa, ARTIFICIAL SEQUENCE
  Synthetic Construct
KKSTQK

SEQ ID NO: 23605 - protein, 6 aa, ARTIFICIAL SEQUENCE
  Synthetic Construct
KKSTRK

SEQ ID NO: 23606 - protein, 6 aa, ARTIFICIAL SEQUENCE
  Synthetic Construct
KKSTSK

SEQ ID NO: 23607 - protein, 6 aa, ARTIFICIAL SEQUENCE
  Synthetic Construct
KKSTTK

SEQ ID NO: 23608 - protein, 6 aa, ARTIFICIAL SEQUENCE
  Synthetic Construct
KKSTYK

SEQ ID NO: 23609 - protein, 6 aa, ARTIFICIAL SEQUENCE
  Synthetic Construct
KKSYAK

SEQ ID NO: 23610 - protein, 6 aa, ARTIFICIAL SEQUENCE
  Synthetic Construct
KKSYDK

SEQ ID NO: 23611 - protein, 6 aa, ARTIFICIAL SEQUENCE
  Synthetic Construct
KKSYEK

SEQ ID NO: 23612 - protein, 6 aa, ARTIFICIAL SEQUENCE
  Synthetic Construct
KKSYFK

SEQ ID NO: 23613 - protein, 6 aa, ARTIFICIAL SEQUENCE
  Synthetic Construct
KKSYGK

SEQ ID NO: 23614 - protein, 6 aa, ARTIFICIAL SEQUENCE
  Synthetic Construct
KKSYHK

SEQ ID NO: 23615 - protein, 6 aa, ARTIFICIAL SEQUENCE
  Synthetic Construct
KKSYIK

SEQ ID NO: 23616 - protein, 6 aa, ARTIFICIAL SEQUENCE
  Synthetic Construct
KKSYLK

SEQ ID NO: 23617 - protein, 6 aa, ARTIFICIAL SEQUENCE
  Synthetic Construct
KKSYNK

SEQ ID NO: 23618 - protein, 6 aa, ARTIFICIAL SEQUENCE
  Synthetic Construct
KKSYQK

SEQ ID NO: 23619 - protein, 6 aa, ARTIFICIAL SEQUENCE
  Synthetic Construct
KKSYRK

SEQ ID NO: 23620 - protein, 6 aa, ARTIFICIAL SEQUENCE
  Synthetic Construct
KKSYSK

SEQ ID NO: 23621 - protein, 6 aa, ARTIFICIAL SEQUENCE
  Synthetic Construct
KKSYTK

SEQ ID NO: 23622 - protein, 6 aa, ARTIFICIAL SEQUENCE
  Synthetic Construct
KKSYYK

SEQ ID NO: 23623 - protein, 6 aa, ARTIFICIAL SEQUENCE
  Synthetic Construct
KKTAAK

SEQ ID NO: 23624 - protein, 6 aa, ARTIFICIAL SEQUENCE
  Synthetic Construct
KKTADK

SEQ ID NO: 23625 - protein, 6 aa, ARTIFICIAL SEQUENCE
  Synthetic Construct
KKTAEK

SEQ ID NO: 23626 - protein, 6 aa, ARTIFICIAL SEQUENCE
  Synthetic Construct
KKTAFK

SEQ ID NO: 23627 - protein, 6 aa, ARTIFICIAL SEQUENCE
  Synthetic Construct
KKTAGK

SEQ ID NO: 23628 - protein, 6 aa, ARTIFICIAL SEQUENCE
  Synthetic Construct
KKTAHK

SEQ ID NO: 23629 - protein, 6 aa, ARTIFICIAL SEQUENCE
  Synthetic Construct
KKTAIK

SEQ ID NO: 23630 - protein, 6 aa, ARTIFICIAL SEQUENCE
  Synthetic Construct
KKTALK

SEQ ID NO: 23631 - protein, 6 aa, ARTIFICIAL SEQUENCE
  Synthetic Construct
KKTANK

SEQ ID NO: 23632 - protein, 6 aa, ARTIFICIAL SEQUENCE
  Synthetic Construct
KKTAQK

SEQ ID NO: 23633 - protein, 6 aa, ARTIFICIAL SEQUENCE
  Synthetic Construct
KKTARK

SEQ ID NO: 23634 - protein, 6 aa, ARTIFICIAL SEQUENCE
  Synthetic Construct
KKTASK

SEQ ID NO: 23635 - protein, 6 aa, ARTIFICIAL SEQUENCE
  Synthetic Construct
KKTATK

SEQ ID NO: 23636 - protein, 6 aa, ARTIFICIAL SEQUENCE
  Synthetic Construct
KKTAYK

SEQ ID NO: 23637 - protein, 6 aa, ARTIFICIAL SEQUENCE
  Synthetic Construct
KKTDAK

SEQ ID NO: 23638 - protein, 6 aa, ARTIFICIAL SEQUENCE
  Synthetic Construct
KKTDDK

SEQ ID NO: 23639 - protein, 6 aa, ARTIFICIAL SEQUENCE
  Synthetic Construct
KKTDEK

SEQ ID NO: 23640 - protein, 6 aa, ARTIFICIAL SEQUENCE
  Synthetic Construct
KKTDFK

SEQ ID NO: 23641 - protein, 6 aa, ARTIFICIAL SEQUENCE
  Synthetic Construct
KKTDGK

SEQ ID NO: 23642 - protein, 6 aa, ARTIFICIAL SEQUENCE
  Synthetic Construct
KKTDHK

SEQ ID NO: 23643 - protein, 6 aa, ARTIFICIAL SEQUENCE
  Synthetic Construct
KKTDIK

SEQ ID NO: 23644 - protein, 6 aa, ARTIFICIAL SEQUENCE
  Synthetic Construct
KKTDLK

SEQ ID NO: 23645 - protein, 6 aa, ARTIFICIAL SEQUENCE
  Synthetic Construct
KKTDNK

SEQ ID NO: 23646 - protein, 6 aa, ARTIFICIAL SEQUENCE
  Synthetic Construct
KKTDQK

SEQ ID NO: 23647 - protein, 6 aa, ARTIFICIAL SEQUENCE
  Synthetic Construct
KKTDRK

SEQ ID NO: 23648 - protein, 6 aa, ARTIFICIAL SEQUENCE
  Synthetic Construct
KKTDSK

SEQ ID NO: 23649 - protein, 6 aa, ARTIFICIAL SEQUENCE
  Synthetic Construct
KKTDTK

SEQ ID NO: 23650 - protein, 6 aa, ARTIFICIAL SEQUENCE
  Synthetic Construct
KKTDYK

SEQ ID NO: 23651 - protein, 6 aa, ARTIFICIAL SEQUENCE
  Synthetic Construct
KKTEAK

SEQ ID NO: 23652 - protein, 6 aa, ARTIFICIAL SEQUENCE
  Synthetic Construct
KKTEDK

SEQ ID NO: 23653 - protein, 6 aa, ARTIFICIAL SEQUENCE
  Synthetic Construct
KKTEEK

SEQ ID NO: 23654 - protein, 6 aa, ARTIFICIAL SEQUENCE
  Synthetic Construct
KKTEFK

SEQ ID NO: 23655 - protein, 6 aa, ARTIFICIAL SEQUENCE
  Synthetic Construct
KKTEGK

SEQ ID NO: 23656 - protein, 6 aa, ARTIFICIAL SEQUENCE
  Synthetic Construct
KKTEHK

SEQ ID NO: 23657 - protein, 6 aa, ARTIFICIAL SEQUENCE
  Synthetic Construct
KKTEIK

SEQ ID NO: 23658 - protein, 6 aa, ARTIFICIAL SEQUENCE
  Synthetic Construct
KKTELK

SEQ ID NO: 23659 - protein, 6 aa, ARTIFICIAL SEQUENCE
  Synthetic Construct
KKTENK

SEQ ID NO: 23660 - protein, 6 aa, ARTIFICIAL SEQUENCE
  Synthetic Construct
KKTEQK

SEQ ID NO: 23661 - protein, 6 aa, ARTIFICIAL SEQUENCE
  Synthetic Construct
KKTERK

SEQ ID NO: 23662 - protein, 6 aa, ARTIFICIAL SEQUENCE
  Synthetic Construct
KKTESK

SEQ ID NO: 23663 - protein, 6 aa, ARTIFICIAL SEQUENCE
  Synthetic Construct
KKTETK

SEQ ID NO: 23664 - protein, 6 aa, ARTIFICIAL SEQUENCE
  Synthetic Construct
KKTEYK

SEQ ID NO: 23665 - protein, 6 aa, ARTIFICIAL SEQUENCE
  Synthetic Construct
KKTFAK

SEQ ID NO: 23666 - protein, 6 aa, ARTIFICIAL SEQUENCE
  Synthetic Construct
KKTFDK

SEQ ID NO: 23667 - protein, 6 aa, ARTIFICIAL SEQUENCE
  Synthetic Construct
KKTFEK

SEQ ID NO: 23668 - protein, 6 aa, ARTIFICIAL SEQUENCE
  Synthetic Construct
KKTFFK

SEQ ID NO: 23669 - protein, 6 aa, ARTIFICIAL SEQUENCE
  Synthetic Construct
KKTFGK

SEQ ID NO: 23670 - protein, 6 aa, ARTIFICIAL SEQUENCE
  Synthetic Construct
KKTFHK

SEQ ID NO: 23671 - protein, 6 aa, ARTIFICIAL SEQUENCE
  Synthetic Construct
KKTFIK

SEQ ID NO: 23672 - protein, 6 aa, ARTIFICIAL SEQUENCE
  Synthetic Construct
KKTFLK

SEQ ID NO: 23673 - protein, 6 aa, ARTIFICIAL SEQUENCE
  Synthetic Construct
KKTFNK

SEQ ID NO: 23674 - protein, 6 aa, ARTIFICIAL SEQUENCE
  Synthetic Construct
KKTFQK

SEQ ID NO: 23675 - protein, 6 aa, ARTIFICIAL SEQUENCE
  Synthetic Construct
KKTFRK

SEQ ID NO: 23676 - protein, 6 aa, ARTIFICIAL SEQUENCE
  Synthetic Construct
KKTFSK

SEQ ID NO: 23677 - protein, 6 aa, ARTIFICIAL SEQUENCE
  Synthetic Construct
KKTFTK

SEQ ID NO: 23678 - protein, 6 aa, ARTIFICIAL SEQUENCE
  Synthetic Construct
KKTFYK

SEQ ID NO: 23679 - protein, 6 aa, ARTIFICIAL SEQUENCE
  Synthetic Construct
KKTGAK

SEQ ID NO: 23680 - protein, 6 aa, ARTIFICIAL SEQUENCE
  Synthetic Construct
KKTGDK

SEQ ID NO: 23681 - protein, 6 aa, ARTIFICIAL SEQUENCE
  Synthetic Construct
KKTGEK

SEQ ID NO: 23682 - protein, 6 aa, ARTIFICIAL SEQUENCE
  Synthetic Construct
KKTGFK

SEQ ID NO: 23683 - protein, 6 aa, ARTIFICIAL SEQUENCE
  Synthetic Construct
KKTGGK

SEQ ID NO: 23684 - protein, 6 aa, ARTIFICIAL SEQUENCE
  Synthetic Construct
KKTGHK

SEQ ID NO: 23685 - protein, 6 aa, ARTIFICIAL SEQUENCE
  Synthetic Construct
KKTGIK

SEQ ID NO: 23686 - protein, 6 aa, ARTIFICIAL SEQUENCE
  Synthetic Construct
KKTGLK

SEQ ID NO: 23687 - protein, 6 aa, ARTIFICIAL SEQUENCE
  Synthetic Construct
KKTGNK

SEQ ID NO: 23688 - protein, 6 aa, ARTIFICIAL SEQUENCE
  Synthetic Construct
KKTGQK

SEQ ID NO: 23689 - protein, 6 aa, ARTIFICIAL SEQUENCE
  Synthetic Construct
KKTGRK

SEQ ID NO: 23690 - protein, 6 aa, ARTIFICIAL SEQUENCE
  Synthetic Construct
KKTGSK

SEQ ID NO: 23691 - protein, 6 aa, ARTIFICIAL SEQUENCE
  Synthetic Construct
KKTGTK

SEQ ID NO: 23692 - protein, 6 aa, ARTIFICIAL SEQUENCE
  Synthetic Construct
KKTGYK

SEQ ID NO: 23693 - protein, 6 aa, ARTIFICIAL SEQUENCE
  Synthetic Construct
KKTHAK

SEQ ID NO: 23694 - protein, 6 aa, ARTIFICIAL SEQUENCE
  Synthetic Construct
KKTHDK

SEQ ID NO: 23695 - protein, 6 aa, ARTIFICIAL SEQUENCE
  Synthetic Construct
KKTHEK

SEQ ID NO: 23696 - protein, 6 aa, ARTIFICIAL SEQUENCE
  Synthetic Construct
KKTHFK

SEQ ID NO: 23697 - protein, 6 aa, ARTIFICIAL SEQUENCE
  Synthetic Construct
KKTHGK

SEQ ID NO: 23698 - protein, 6 aa, ARTIFICIAL SEQUENCE
  Synthetic Construct
KKTHHK

SEQ ID NO: 23699 - protein, 6 aa, ARTIFICIAL SEQUENCE
  Synthetic Construct
KKTHIK

SEQ ID NO: 23700 - protein, 6 aa, ARTIFICIAL SEQUENCE
  Synthetic Construct
KKTHLK

SEQ ID NO: 23701 - protein, 6 aa, ARTIFICIAL SEQUENCE
  Synthetic Construct
KKTHNK

SEQ ID NO: 23702 - protein, 6 aa, ARTIFICIAL SEQUENCE
  Synthetic Construct
KKTHQK

SEQ ID NO: 23703 - protein, 6 aa, ARTIFICIAL SEQUENCE
  Synthetic Construct
KKTHRK

SEQ ID NO: 23704 - protein, 6 aa, ARTIFICIAL SEQUENCE
  Synthetic Construct
KKTHSK

SEQ ID NO: 23705 - protein, 6 aa, ARTIFICIAL SEQUENCE
  Synthetic Construct
KKTHTK

SEQ ID NO: 23706 - protein, 6 aa, ARTIFICIAL SEQUENCE
  Synthetic Construct
KKTHYK

SEQ ID NO: 23707 - protein, 6 aa, ARTIFICIAL SEQUENCE
  Synthetic Construct
KKTIAK

SEQ ID NO: 23708 - protein, 6 aa, ARTIFICIAL SEQUENCE
  Synthetic Construct
KKTIDK

SEQ ID NO: 23709 - protein, 6 aa, ARTIFICIAL SEQUENCE
  Synthetic Construct
KKTIEK

SEQ ID NO: 23710 - protein, 6 aa, ARTIFICIAL SEQUENCE
  Synthetic Construct
KKTIFK

SEQ ID NO: 23711 - protein, 6 aa, ARTIFICIAL SEQUENCE
  Synthetic Construct
KKTIGK

SEQ ID NO: 23712 - protein, 6 aa, ARTIFICIAL SEQUENCE
  Synthetic Construct
KKTIHK

SEQ ID NO: 23713 - protein, 6 aa, ARTIFICIAL SEQUENCE
  Synthetic Construct
KKTIIK

SEQ ID NO: 23714 - protein, 6 aa, ARTIFICIAL SEQUENCE
  Synthetic Construct
KKTILK

SEQ ID NO: 23715 - protein, 6 aa, ARTIFICIAL SEQUENCE
  Synthetic Construct
KKTINK

SEQ ID NO: 23716 - protein, 6 aa, ARTIFICIAL SEQUENCE
  Synthetic Construct
KKTIQK

SEQ ID NO: 23717 - protein, 6 aa, ARTIFICIAL SEQUENCE
  Synthetic Construct
KKTIRK

SEQ ID NO: 23718 - protein, 6 aa, ARTIFICIAL SEQUENCE
  Synthetic Construct
KKTISK

SEQ ID NO: 23719 - protein, 6 aa, ARTIFICIAL SEQUENCE
  Synthetic Construct
KKTITK

SEQ ID NO: 23720 - protein, 6 aa, ARTIFICIAL SEQUENCE
  Synthetic Construct
KKTIYK

SEQ ID NO: 23721 - protein, 6 aa, ARTIFICIAL SEQUENCE
  Synthetic Construct
KKTLAK

SEQ ID NO: 23722 - protein, 6 aa, ARTIFICIAL SEQUENCE
  Synthetic Construct
KKTLDK

SEQ ID NO: 23723 - protein, 6 aa, ARTIFICIAL SEQUENCE
  Synthetic Construct
KKTLEK

SEQ ID NO: 23724 - protein, 6 aa, ARTIFICIAL SEQUENCE
  Synthetic Construct
KKTLFK

SEQ ID NO: 23725 - protein, 6 aa, ARTIFICIAL SEQUENCE
  Synthetic Construct
KKTLGK

SEQ ID NO: 23726 - protein, 6 aa, ARTIFICIAL SEQUENCE
  Synthetic Construct
KKTLHK

SEQ ID NO: 23727 - protein, 6 aa, ARTIFICIAL SEQUENCE
  Synthetic Construct
KKTLIK

SEQ ID NO: 23728 - protein, 6 aa, ARTIFICIAL SEQUENCE
  Synthetic Construct
KKTLLK

SEQ ID NO: 23729 - protein, 6 aa, ARTIFICIAL SEQUENCE
  Synthetic Construct
KKTLNK

SEQ ID NO: 23730 - protein, 6 aa, ARTIFICIAL SEQUENCE
  Synthetic Construct
KKTLQK

SEQ ID NO: 23731 - protein, 6 aa, ARTIFICIAL SEQUENCE
  Synthetic Construct
KKTLRK

SEQ ID NO: 23732 - protein, 6 aa, ARTIFICIAL SEQUENCE
  Synthetic Construct
KKTLSK

SEQ ID NO: 23733 - protein, 6 aa, ARTIFICIAL SEQUENCE
  Synthetic Construct
KKTLTK

SEQ ID NO: 23734 - protein, 6 aa, ARTIFICIAL SEQUENCE
  Synthetic Construct
KKTLYK

SEQ ID NO: 23735 - protein, 6 aa, ARTIFICIAL SEQUENCE
  Synthetic Construct
KKTNAK

SEQ ID NO: 23736 - protein, 6 aa, ARTIFICIAL SEQUENCE
  Synthetic Construct
KKTNDK

SEQ ID NO: 23737 - protein, 6 aa, ARTIFICIAL SEQUENCE
  Synthetic Construct
KKTNEK

SEQ ID NO: 23738 - protein, 6 aa, ARTIFICIAL SEQUENCE
  Synthetic Construct
KKTNFK

SEQ ID NO: 23739 - protein, 6 aa, ARTIFICIAL SEQUENCE
  Synthetic Construct
KKTNGK

SEQ ID NO: 23740 - protein, 6 aa, ARTIFICIAL SEQUENCE
  Synthetic Construct
KKTNHK

SEQ ID NO: 23741 - protein, 6 aa, ARTIFICIAL SEQUENCE
  Synthetic Construct
KKTNIK

SEQ ID NO: 23742 - protein, 6 aa, ARTIFICIAL SEQUENCE
  Synthetic Construct
KKTNLK

SEQ ID NO: 23743 - protein, 6 aa, ARTIFICIAL SEQUENCE
  Synthetic Construct
KKTNNK

SEQ ID NO: 23744 - protein, 6 aa, ARTIFICIAL SEQUENCE
  Synthetic Construct
KKTNQK

SEQ ID NO: 23745 - protein, 6 aa, ARTIFICIAL SEQUENCE
  Synthetic Construct
KKTNRK

SEQ ID NO: 23746 - protein, 6 aa, ARTIFICIAL SEQUENCE
  Synthetic Construct
KKTNSK

SEQ ID NO: 23747 - protein, 6 aa, ARTIFICIAL SEQUENCE
  Synthetic Construct
KKTNTK

SEQ ID NO: 23748 - protein, 6 aa, ARTIFICIAL SEQUENCE
  Synthetic Construct
KKTNYK

SEQ ID NO: 23749 - protein, 6 aa, ARTIFICIAL SEQUENCE
  Synthetic Construct
KKTQAK

SEQ ID NO: 23750 - protein, 6 aa, ARTIFICIAL SEQUENCE
  Synthetic Construct
KKTQDK

SEQ ID NO: 23751 - protein, 6 aa, ARTIFICIAL SEQUENCE
  Synthetic Construct
KKTQEK

SEQ ID NO: 23752 - protein, 6 aa, ARTIFICIAL SEQUENCE
  Synthetic Construct
KKTQFK

SEQ ID NO: 23753 - protein, 6 aa, ARTIFICIAL SEQUENCE
  Synthetic Construct
KKTQGK

SEQ ID NO: 23754 - protein, 6 aa, ARTIFICIAL SEQUENCE
  Synthetic Construct
KKTQHK

SEQ ID NO: 23755 - protein, 6 aa, ARTIFICIAL SEQUENCE
  Synthetic Construct
KKTQIK

SEQ ID NO: 23756 - protein, 6 aa, ARTIFICIAL SEQUENCE
  Synthetic Construct
KKTQLK

SEQ ID NO: 23757 - protein, 6 aa, ARTIFICIAL SEQUENCE
  Synthetic Construct
KKTQNK

SEQ ID NO: 23758 - protein, 6 aa, ARTIFICIAL SEQUENCE
  Synthetic Construct
KKTQQK

SEQ ID NO: 23759 - protein, 6 aa, ARTIFICIAL SEQUENCE
  Synthetic Construct
KKTQRK

SEQ ID NO: 23760 - protein, 6 aa, ARTIFICIAL SEQUENCE
  Synthetic Construct
KKTQSK

SEQ ID NO: 23761 - protein, 6 aa, ARTIFICIAL SEQUENCE
  Synthetic Construct
KKTQTK

SEQ ID NO: 23762 - protein, 6 aa, ARTIFICIAL SEQUENCE
  Synthetic Construct
KKTQYK

SEQ ID NO: 23763 - protein, 6 aa, ARTIFICIAL SEQUENCE
  Synthetic Construct
KKTRAK

SEQ ID NO: 23764 - protein, 6 aa, ARTIFICIAL SEQUENCE
  Synthetic Construct
KKTRDK

SEQ ID NO: 23765 - protein, 6 aa, ARTIFICIAL SEQUENCE
  Synthetic Construct
KKTREK

SEQ ID NO: 23766 - protein, 6 aa, ARTIFICIAL SEQUENCE
  Synthetic Construct
KKTRFK

SEQ ID NO: 23767 - protein, 6 aa, ARTIFICIAL SEQUENCE
  Synthetic Construct
KKTRGK

SEQ ID NO: 23768 - protein, 6 aa, ARTIFICIAL SEQUENCE
  Synthetic Construct
KKTRHK

SEQ ID NO: 23769 - protein, 6 aa, ARTIFICIAL SEQUENCE
  Synthetic Construct
KKTRIK

SEQ ID NO: 23770 - protein, 6 aa, ARTIFICIAL SEQUENCE
  Synthetic Construct
KKTRLK

SEQ ID NO: 23771 - protein, 6 aa, ARTIFICIAL SEQUENCE
  Synthetic Construct
KKTRNK

SEQ ID NO: 23772 - protein, 6 aa, ARTIFICIAL SEQUENCE
  Synthetic Construct
KKTRQK

SEQ ID NO: 23773 - protein, 6 aa, ARTIFICIAL SEQUENCE
  Synthetic Construct
KKTRRK

SEQ ID NO: 23774 - protein, 6 aa, ARTIFICIAL SEQUENCE
  Synthetic Construct
KKTRSK

SEQ ID NO: 23775 - protein, 6 aa, ARTIFICIAL SEQUENCE
  Synthetic Construct
KKTRTK

SEQ ID NO: 23776 - protein, 6 aa, ARTIFICIAL SEQUENCE
  Synthetic Construct
KKTRYK

SEQ ID NO: 23777 - protein, 6 aa, ARTIFICIAL SEQUENCE
  Synthetic Construct
KKTSAK

SEQ ID NO: 23778 - protein, 6 aa, ARTIFICIAL SEQUENCE
  Synthetic Construct
KKTSDK

SEQ ID NO: 23779 - protein, 6 aa, ARTIFICIAL SEQUENCE
  Synthetic Construct
KKTSEK

SEQ ID NO: 23780 - protein, 6 aa, ARTIFICIAL SEQUENCE
  Synthetic Construct
KKTSFK

SEQ ID NO: 23781 - protein, 6 aa, ARTIFICIAL SEQUENCE
  Synthetic Construct
KKTSGK

SEQ ID NO: 23782 - protein, 6 aa, ARTIFICIAL SEQUENCE
  Synthetic Construct
KKTSHK

SEQ ID NO: 23783 - protein, 6 aa, ARTIFICIAL SEQUENCE
  Synthetic Construct
KKTSIK

SEQ ID NO: 23784 - protein, 6 aa, ARTIFICIAL SEQUENCE
  Synthetic Construct
KKTSLK

SEQ ID NO: 23785 - protein, 6 aa, ARTIFICIAL SEQUENCE
  Synthetic Construct
KKTSNK

SEQ ID NO: 23786 - protein, 6 aa, ARTIFICIAL SEQUENCE
  Synthetic Construct
KKTSQK

SEQ ID NO: 23787 - protein, 6 aa, ARTIFICIAL SEQUENCE
  Synthetic Construct
KKTSRK

SEQ ID NO: 23788 - protein, 6 aa, ARTIFICIAL SEQUENCE
  Synthetic Construct
KKTSSK

SEQ ID NO: 23789 - protein, 6 aa, ARTIFICIAL SEQUENCE
  Synthetic Construct
KKTSTK

SEQ ID NO: 23790 - protein, 6 aa, ARTIFICIAL SEQUENCE
  Synthetic Construct
KKTSYK

SEQ ID NO: 23791 - protein, 6 aa, ARTIFICIAL SEQUENCE
  Synthetic Construct
KKTTAK

SEQ ID NO: 23792 - protein, 6 aa, ARTIFICIAL SEQUENCE
  Synthetic Construct
KKTTDK

SEQ ID NO: 23793 - protein, 6 aa, ARTIFICIAL SEQUENCE
  Synthetic Construct
KKTTEK

SEQ ID NO: 23794 - protein, 6 aa, ARTIFICIAL SEQUENCE
  Synthetic Construct
KKTTFK

SEQ ID NO: 23795 - protein, 6 aa, ARTIFICIAL SEQUENCE
  Synthetic Construct
KKTTGK

SEQ ID NO: 23796 - protein, 6 aa, ARTIFICIAL SEQUENCE
  Synthetic Construct
KKTTHK

SEQ ID NO: 23797 - protein, 6 aa, ARTIFICIAL SEQUENCE
  Synthetic Construct
KKTTIK

SEQ ID NO: 23798 - protein, 6 aa, ARTIFICIAL SEQUENCE
  Synthetic Construct
KKTTLK

SEQ ID NO: 23799 - protein, 6 aa, ARTIFICIAL SEQUENCE
  Synthetic Construct
KKTTNK

SEQ ID NO: 23800 - protein, 6 aa, ARTIFICIAL SEQUENCE
  Synthetic Construct
KKTTQK

SEQ ID NO: 23801 - protein, 6 aa, ARTIFICIAL SEQUENCE
  Synthetic Construct
KKTTRK

SEQ ID NO: 23802 - protein, 6 aa, ARTIFICIAL SEQUENCE
  Synthetic Construct
KKTTSK

SEQ ID NO: 23803 - protein, 6 aa, ARTIFICIAL SEQUENCE
  Synthetic Construct
KKTTTK

SEQ ID NO: 23804 - protein, 6 aa, ARTIFICIAL SEQUENCE
  Synthetic Construct
KKTTYK

SEQ ID NO: 23805 - protein, 6 aa, ARTIFICIAL SEQUENCE
  Synthetic Construct
KKTYAK

SEQ ID NO: 23806 - protein, 6 aa, ARTIFICIAL SEQUENCE
  Synthetic Construct
KKTYDK

SEQ ID NO: 23807 - protein, 6 aa, ARTIFICIAL SEQUENCE
  Synthetic Construct
KKTYEK

SEQ ID NO: 23808 - protein, 6 aa, ARTIFICIAL SEQUENCE
  Synthetic Construct
KKTYFK

SEQ ID NO: 23809 - protein, 6 aa, ARTIFICIAL SEQUENCE
  Synthetic Construct
KKTYGK

SEQ ID NO: 23810 - protein, 6 aa, ARTIFICIAL SEQUENCE
  Synthetic Construct
KKTYHK

SEQ ID NO: 23811 - protein, 6 aa, ARTIFICIAL SEQUENCE
  Synthetic Construct
KKTYIK

SEQ ID NO: 23812 - protein, 6 aa, ARTIFICIAL SEQUENCE
  Synthetic Construct
KKTYLK

SEQ ID NO: 23813 - protein, 6 aa, ARTIFICIAL SEQUENCE
  Synthetic Construct
KKTYNK

SEQ ID NO: 23814 - protein, 6 aa, ARTIFICIAL SEQUENCE
  Synthetic Construct
KKTYQK

SEQ ID NO: 23815 - protein, 6 aa, ARTIFICIAL SEQUENCE
  Synthetic Construct
KKTYRK

SEQ ID NO: 23816 - protein, 6 aa, ARTIFICIAL SEQUENCE
  Synthetic Construct
KKTYSK

SEQ ID NO: 23817 - protein, 6 aa, ARTIFICIAL SEQUENCE
  Synthetic Construct
KKTYTK

SEQ ID NO: 23818 - protein, 6 aa, ARTIFICIAL SEQUENCE
  Synthetic Construct
KKTYYK

SEQ ID NO: 23819 - protein, 6 aa, ARTIFICIAL SEQUENCE
  Synthetic Construct
KKYAAK

SEQ ID NO: 23820 - protein, 6 aa, ARTIFICIAL SEQUENCE
  Synthetic Construct
KKYADK

SEQ ID NO: 23821 - protein, 6 aa, ARTIFICIAL SEQUENCE
  Synthetic Construct
KKYAEK

SEQ ID NO: 23822 - protein, 6 aa, ARTIFICIAL SEQUENCE
  Synthetic Construct
KKYAFK

SEQ ID NO: 23823 - protein, 6 aa, ARTIFICIAL SEQUENCE
  Synthetic Construct
KKYAGK

SEQ ID NO: 23824 - protein, 6 aa, ARTIFICIAL SEQUENCE
  Synthetic Construct
KKYAHK

SEQ ID NO: 23825 - protein, 6 aa, ARTIFICIAL SEQUENCE
  Synthetic Construct
KKYAIK

SEQ ID NO: 23826 - protein, 6 aa, ARTIFICIAL SEQUENCE
  Synthetic Construct
KKYALK

SEQ ID NO: 23827 - protein, 6 aa, ARTIFICIAL SEQUENCE
  Synthetic Construct
KKYANK

SEQ ID NO: 23828 - protein, 6 aa, ARTIFICIAL SEQUENCE
  Synthetic Construct
KKYAQK

SEQ ID NO: 23829 - protein, 6 aa, ARTIFICIAL SEQUENCE
  Synthetic Construct
KKYARK

SEQ ID NO: 23830 - protein, 6 aa, ARTIFICIAL SEQUENCE
  Synthetic Construct
KKYASK

SEQ ID NO: 23831 - protein, 6 aa, ARTIFICIAL SEQUENCE
  Synthetic Construct
KKYATK

SEQ ID NO: 23832 - protein, 6 aa, ARTIFICIAL SEQUENCE
  Synthetic Construct
KKYAYK

SEQ ID NO: 23833 - protein, 6 aa, ARTIFICIAL SEQUENCE
  Synthetic Construct
KKYDAK

SEQ ID NO: 23834 - protein, 6 aa, ARTIFICIAL SEQUENCE
  Synthetic Construct
KKYDDK

SEQ ID NO: 23835 - protein, 6 aa, ARTIFICIAL SEQUENCE
  Synthetic Construct
KKYDEK

SEQ ID NO: 23836 - protein, 6 aa, ARTIFICIAL SEQUENCE
  Synthetic Construct
KKYDFK

SEQ ID NO: 23837 - protein, 6 aa, ARTIFICIAL SEQUENCE
  Synthetic Construct
KKYDGK

SEQ ID NO: 23838 - protein, 6 aa, ARTIFICIAL SEQUENCE
  Synthetic Construct
KKYDHK

SEQ ID NO: 23839 - protein, 6 aa, ARTIFICIAL SEQUENCE
  Synthetic Construct
KKYDIK

SEQ ID NO: 23840 - protein, 6 aa, ARTIFICIAL SEQUENCE
  Synthetic Construct
KKYDLK

SEQ ID NO: 23841 - protein, 6 aa, ARTIFICIAL SEQUENCE
  Synthetic Construct
KKYDNK

SEQ ID NO: 23842 - protein, 6 aa, ARTIFICIAL SEQUENCE
  Synthetic Construct
KKYDQK

SEQ ID NO: 23843 - protein, 6 aa, ARTIFICIAL SEQUENCE
  Synthetic Construct
KKYDRK

SEQ ID NO: 23844 - protein, 6 aa, ARTIFICIAL SEQUENCE
  Synthetic Construct
KKYDSK

SEQ ID NO: 23845 - protein, 6 aa, ARTIFICIAL SEQUENCE
  Synthetic Construct
KKYDTK

SEQ ID NO: 23846 - protein, 6 aa, ARTIFICIAL SEQUENCE
  Synthetic Construct
KKYDYK

SEQ ID NO: 23847 - protein, 6 aa, ARTIFICIAL SEQUENCE
  Synthetic Construct
KKYEAK

SEQ ID NO: 23848 - protein, 6 aa, ARTIFICIAL SEQUENCE
  Synthetic Construct
KKYEDK

SEQ ID NO: 23849 - protein, 6 aa, ARTIFICIAL SEQUENCE
  Synthetic Construct
KKYEEK

SEQ ID NO: 23850 - protein, 6 aa, ARTIFICIAL SEQUENCE
  Synthetic Construct
KKYEFK

SEQ ID NO: 23851 - protein, 6 aa, ARTIFICIAL SEQUENCE
  Synthetic Construct
KKYEGK

SEQ ID NO: 23852 - protein, 6 aa, ARTIFICIAL SEQUENCE
  Synthetic Construct
KKYEHK

SEQ ID NO: 23853 - protein, 6 aa, ARTIFICIAL SEQUENCE
  Synthetic Construct
KKYEIK

SEQ ID NO: 23854 - protein, 6 aa, ARTIFICIAL SEQUENCE
  Synthetic Construct
KKYELK

SEQ ID NO: 23855 - protein, 6 aa, ARTIFICIAL SEQUENCE
  Synthetic Construct
KKYENK

SEQ ID NO: 23856 - protein, 6 aa, ARTIFICIAL SEQUENCE
  Synthetic Construct
KKYEQK

SEQ ID NO: 23857 - protein, 6 aa, ARTIFICIAL SEQUENCE
  Synthetic Construct
KKYERK

SEQ ID NO: 23858 - protein, 6 aa, ARTIFICIAL SEQUENCE
  Synthetic Construct
KKYESK

SEQ ID NO: 23859 - protein, 6 aa, ARTIFICIAL SEQUENCE
  Synthetic Construct
KKYETK

SEQ ID NO: 23860 - protein, 6 aa, ARTIFICIAL SEQUENCE
  Synthetic Construct
KKYEYK

SEQ ID NO: 23861 - protein, 6 aa, ARTIFICIAL SEQUENCE
  Synthetic Construct
KKYFAK

SEQ ID NO: 23862 - protein, 6 aa, ARTIFICIAL SEQUENCE
  Synthetic Construct
KKYFDK

SEQ ID NO: 23863 - protein, 6 aa, ARTIFICIAL SEQUENCE
  Synthetic Construct
KKYFEK

SEQ ID NO: 23864 - protein, 6 aa, ARTIFICIAL SEQUENCE
  Synthetic Construct
KKYFFK

SEQ ID NO: 23865 - protein, 6 aa, ARTIFICIAL SEQUENCE
  Synthetic Construct
KKYFGK

SEQ ID NO: 23866 - protein, 6 aa, ARTIFICIAL SEQUENCE
  Synthetic Construct
KKYFHK

SEQ ID NO: 23867 - protein, 6 aa, ARTIFICIAL SEQUENCE
  Synthetic Construct
KKYFIK

SEQ ID NO: 23868 - protein, 6 aa, ARTIFICIAL SEQUENCE
  Synthetic Construct
KKYFLK

SEQ ID NO: 23869 - protein, 6 aa, ARTIFICIAL SEQUENCE
  Synthetic Construct
KKYFNK

SEQ ID NO: 23870 - protein, 6 aa, ARTIFICIAL SEQUENCE
  Synthetic Construct
KKYFQK

SEQ ID NO: 23871 - protein, 6 aa, ARTIFICIAL SEQUENCE
  Synthetic Construct
KKYFRK

SEQ ID NO: 23872 - protein, 6 aa, ARTIFICIAL SEQUENCE
  Synthetic Construct
KKYFSK

SEQ ID NO: 23873 - protein, 6 aa, ARTIFICIAL SEQUENCE
  Synthetic Construct
KKYFTK

SEQ ID NO: 23874 - protein, 6 aa, ARTIFICIAL SEQUENCE
  Synthetic Construct
KKYFYK

SEQ ID NO: 23875 - protein, 6 aa, ARTIFICIAL SEQUENCE
  Synthetic Construct
KKYGAK

SEQ ID NO: 23876 - protein, 6 aa, ARTIFICIAL SEQUENCE
  Synthetic Construct
KKYGDK

SEQ ID NO: 23877 - protein, 6 aa, ARTIFICIAL SEQUENCE
  Synthetic Construct
KKYGEK

SEQ ID NO: 23878 - protein, 6 aa, ARTIFICIAL SEQUENCE
  Synthetic Construct
KKYGFK

SEQ ID NO: 23879 - protein, 6 aa, ARTIFICIAL SEQUENCE
  Synthetic Construct
KKYGGK

SEQ ID NO: 23880 - protein, 6 aa, ARTIFICIAL SEQUENCE
  Synthetic Construct
KKYGHK

SEQ ID NO: 23881 - protein, 6 aa, ARTIFICIAL SEQUENCE
  Synthetic Construct
KKYGIK

SEQ ID NO: 23882 - protein, 6 aa, ARTIFICIAL SEQUENCE
  Synthetic Construct
KKYGLK

SEQ ID NO: 23883 - protein, 6 aa, ARTIFICIAL SEQUENCE
  Synthetic Construct
KKYGNK

SEQ ID NO: 23884 - protein, 6 aa, ARTIFICIAL SEQUENCE
  Synthetic Construct
KKYGQK

SEQ ID NO: 23885 - protein, 6 aa, ARTIFICIAL SEQUENCE
  Synthetic Construct
KKYGRK

SEQ ID NO: 23886 - protein, 6 aa, ARTIFICIAL SEQUENCE
  Synthetic Construct
KKYGSK

SEQ ID NO: 23887 - protein, 6 aa, ARTIFICIAL SEQUENCE
  Synthetic Construct
KKYGTK

SEQ ID NO: 23888 - protein, 6 aa, ARTIFICIAL SEQUENCE
  Synthetic Construct
KKYGYK

SEQ ID NO: 23889 - protein, 6 aa, ARTIFICIAL SEQUENCE
  Synthetic Construct
KKYHAK

SEQ ID NO: 23890 - protein, 6 aa, ARTIFICIAL SEQUENCE
  Synthetic Construct
KKYHDK

SEQ ID NO: 23891 - protein, 6 aa, ARTIFICIAL SEQUENCE
  Synthetic Construct
KKYHEK

SEQ ID NO: 23892 - protein, 6 aa, ARTIFICIAL SEQUENCE
  Synthetic Construct
KKYHFK

SEQ ID NO: 23893 - protein, 6 aa, ARTIFICIAL SEQUENCE
  Synthetic Construct
KKYHGK

SEQ ID NO: 23894 - protein, 6 aa, ARTIFICIAL SEQUENCE
  Synthetic Construct
KKYHHK

SEQ ID NO: 23895 - protein, 6 aa, ARTIFICIAL SEQUENCE
  Synthetic Construct
KKYHIK

SEQ ID NO: 23896 - protein, 6 aa, ARTIFICIAL SEQUENCE
  Synthetic Construct
KKYHLK

SEQ ID NO: 23897 - protein, 6 aa, ARTIFICIAL SEQUENCE
  Synthetic Construct
KKYHNK

SEQ ID NO: 23898 - protein, 6 aa, ARTIFICIAL SEQUENCE
  Synthetic Construct
KKYHQK

SEQ ID NO: 23899 - protein, 6 aa, ARTIFICIAL SEQUENCE
  Synthetic Construct
KKYHRK

SEQ ID NO: 23900 - protein, 6 aa, ARTIFICIAL SEQUENCE
  Synthetic Construct
KKYHSK

SEQ ID NO: 23901 - protein, 6 aa, ARTIFICIAL SEQUENCE
  Synthetic Construct
KKYHTK

SEQ ID NO: 23902 - protein, 6 aa, ARTIFICIAL SEQUENCE
  Synthetic Construct
KKYHYK

SEQ ID NO: 23903 - protein, 6 aa, ARTIFICIAL SEQUENCE
  Synthetic Construct
KKYIAK

SEQ ID NO: 23904 - protein, 6 aa, ARTIFICIAL SEQUENCE
  Synthetic Construct
KKYIDK

SEQ ID NO: 23905 - protein, 6 aa, ARTIFICIAL SEQUENCE
  Synthetic Construct
KKYIEK

SEQ ID NO: 23906 - protein, 6 aa, ARTIFICIAL SEQUENCE
  Synthetic Construct
KKYIFK

SEQ ID NO: 23907 - protein, 6 aa, ARTIFICIAL SEQUENCE
  Synthetic Construct
KKYIGK

SEQ ID NO: 23908 - protein, 6 aa, ARTIFICIAL SEQUENCE
  Synthetic Construct
KKYIHK

SEQ ID NO: 23909 - protein, 6 aa, ARTIFICIAL SEQUENCE
  Synthetic Construct
KKYIIK

SEQ ID NO: 23910 - protein, 6 aa, ARTIFICIAL SEQUENCE
  Synthetic Construct
KKYILK

SEQ ID NO: 23911 - protein, 6 aa, ARTIFICIAL SEQUENCE
  Synthetic Construct
KKYINK

SEQ ID NO: 23912 - protein, 6 aa, ARTIFICIAL SEQUENCE
  Synthetic Construct
KKYIQK

SEQ ID NO: 23913 - protein, 6 aa, ARTIFICIAL SEQUENCE
  Synthetic Construct
KKYIRK

SEQ ID NO: 23914 - protein, 6 aa, ARTIFICIAL SEQUENCE
  Synthetic Construct
KKYISK

SEQ ID NO: 23915 - protein, 6 aa, ARTIFICIAL SEQUENCE
  Synthetic Construct
KKYITK

SEQ ID NO: 23916 - protein, 6 aa, ARTIFICIAL SEQUENCE
  Synthetic Construct
KKYIYK

SEQ ID NO: 23917 - protein, 6 aa, ARTIFICIAL SEQUENCE
  Synthetic Construct
KKYLAK

SEQ ID NO: 23918 - protein, 6 aa, ARTIFICIAL SEQUENCE
  Synthetic Construct
KKYLDK

SEQ ID NO: 23919 - protein, 6 aa, ARTIFICIAL SEQUENCE
  Synthetic Construct
KKYLEK

SEQ ID NO: 23920 - protein, 6 aa, ARTIFICIAL SEQUENCE
  Synthetic Construct
KKYLFK

SEQ ID NO: 23921 - protein, 6 aa, ARTIFICIAL SEQUENCE
  Synthetic Construct
KKYLGK

SEQ ID NO: 23922 - protein, 6 aa, ARTIFICIAL SEQUENCE
  Synthetic Construct
KKYLHK

SEQ ID NO: 23923 - protein, 6 aa, ARTIFICIAL SEQUENCE
  Synthetic Construct
KKYLIK

SEQ ID NO: 23924 - protein, 6 aa, ARTIFICIAL SEQUENCE
  Synthetic Construct
KKYLLK

SEQ ID NO: 23925 - protein, 6 aa, ARTIFICIAL SEQUENCE
  Synthetic Construct
KKYLNK

SEQ ID NO: 23926 - protein, 6 aa, ARTIFICIAL SEQUENCE
  Synthetic Construct
KKYLQK

SEQ ID NO: 23927 - protein, 6 aa, ARTIFICIAL SEQUENCE
  Synthetic Construct
KKYLRK

SEQ ID NO: 23928 - protein, 6 aa, ARTIFICIAL SEQUENCE
  Synthetic Construct
KKYLSK

SEQ ID NO: 23929 - protein, 6 aa, ARTIFICIAL SEQUENCE
  Synthetic Construct
KKYLTK

SEQ ID NO: 23930 - protein, 6 aa, ARTIFICIAL SEQUENCE
  Synthetic Construct
KKYLYK

SEQ ID NO: 23931 - protein, 6 aa, ARTIFICIAL SEQUENCE
  Synthetic Construct
KKYNAK

SEQ ID NO: 23932 - protein, 6 aa, ARTIFICIAL SEQUENCE
  Synthetic Construct
KKYNDK

SEQ ID NO: 23933 - protein, 6 aa, ARTIFICIAL SEQUENCE
  Synthetic Construct
KKYNEK

SEQ ID NO: 23934 - protein, 6 aa, ARTIFICIAL SEQUENCE
  Synthetic Construct
KKYNFK

SEQ ID NO: 23935 - protein, 6 aa, ARTIFICIAL SEQUENCE
  Synthetic Construct
KKYNGK

SEQ ID NO: 23936 - protein, 6 aa, ARTIFICIAL SEQUENCE
  Synthetic Construct
KKYNHK

SEQ ID NO: 23937 - protein, 6 aa, ARTIFICIAL SEQUENCE
  Synthetic Construct
KKYNIK

SEQ ID NO: 23938 - protein, 6 aa, ARTIFICIAL SEQUENCE
  Synthetic Construct
KKYNLK

SEQ ID NO: 23939 - protein, 6 aa, ARTIFICIAL SEQUENCE
  Synthetic Construct
KKYNNK

SEQ ID NO: 23940 - protein, 6 aa, ARTIFICIAL SEQUENCE
  Synthetic Construct
KKYNQK

SEQ ID NO: 23941 - protein, 6 aa, ARTIFICIAL SEQUENCE
  Synthetic Construct
KKYNRK

SEQ ID NO: 23942 - protein, 6 aa, ARTIFICIAL SEQUENCE
  Synthetic Construct
KKYNSK

SEQ ID NO: 23943 - protein, 6 aa, ARTIFICIAL SEQUENCE
  Synthetic Construct
KKYNTK

SEQ ID NO: 23944 - protein, 6 aa, ARTIFICIAL SEQUENCE
  Synthetic Construct
KKYNYK

SEQ ID NO: 23945 - protein, 6 aa, ARTIFICIAL SEQUENCE
  Synthetic Construct
KKYQAK

SEQ ID NO: 23946 - protein, 6 aa, ARTIFICIAL SEQUENCE
  Synthetic Construct
KKYQDK

SEQ ID NO: 23947 - protein, 6 aa, ARTIFICIAL SEQUENCE
  Synthetic Construct
KKYQEK

SEQ ID NO: 23948 - protein, 6 aa, ARTIFICIAL SEQUENCE
  Synthetic Construct
KKYQFK

SEQ ID NO: 23949 - protein, 6 aa, ARTIFICIAL SEQUENCE
  Synthetic Construct
KKYQGK

SEQ ID NO: 23950 - protein, 6 aa, ARTIFICIAL SEQUENCE
  Synthetic Construct
KKYQHK

SEQ ID NO: 23951 - protein, 6 aa, ARTIFICIAL SEQUENCE
  Synthetic Construct
KKYQIK

SEQ ID NO: 23952 - protein, 6 aa, ARTIFICIAL SEQUENCE
  Synthetic Construct
KKYQLK

SEQ ID NO: 23953 - protein, 6 aa, ARTIFICIAL SEQUENCE
  Synthetic Construct
KKYQNK

SEQ ID NO: 23954 - protein, 6 aa, ARTIFICIAL SEQUENCE
  Synthetic Construct
KKYQQK

SEQ ID NO: 23955 - protein, 6 aa, ARTIFICIAL SEQUENCE
  Synthetic Construct
KKYQRK

SEQ ID NO: 23956 - protein, 6 aa, ARTIFICIAL SEQUENCE
  Synthetic Construct
KKYQSK

SEQ ID NO: 23957 - protein, 6 aa, ARTIFICIAL SEQUENCE
  Synthetic Construct
KKYQTK

SEQ ID NO: 23958 - protein, 6 aa, ARTIFICIAL SEQUENCE
  Synthetic Construct
KKYQYK

SEQ ID NO: 23959 - protein, 6 aa, ARTIFICIAL SEQUENCE
  Synthetic Construct
KKYRAK

SEQ ID NO: 23960 - protein, 6 aa, ARTIFICIAL SEQUENCE
  Synthetic Construct
KKYRDK

SEQ ID NO: 23961 - protein, 6 aa, ARTIFICIAL SEQUENCE
  Synthetic Construct
KKYREK

SEQ ID NO: 23962 - protein, 6 aa, ARTIFICIAL SEQUENCE
  Synthetic Construct
KKYRFK

SEQ ID NO: 23963 - protein, 6 aa, ARTIFICIAL SEQUENCE
  Synthetic Construct
KKYRGK

SEQ ID NO: 23964 - protein, 6 aa, ARTIFICIAL SEQUENCE
  Synthetic Construct
KKYRHK

SEQ ID NO: 23965 - protein, 6 aa, ARTIFICIAL SEQUENCE
  Synthetic Construct
KKYRIK

SEQ ID NO: 23966 - protein, 6 aa, ARTIFICIAL SEQUENCE
  Synthetic Construct
KKYRLK

SEQ ID NO: 23967 - protein, 6 aa, ARTIFICIAL SEQUENCE
  Synthetic Construct
KKYRNK

SEQ ID NO: 23968 - protein, 6 aa, ARTIFICIAL SEQUENCE
  Synthetic Construct
KKYRQK

SEQ ID NO: 23969 - protein, 6 aa, ARTIFICIAL SEQUENCE
  Synthetic Construct
KKYRRK

SEQ ID NO: 23970 - protein, 6 aa, ARTIFICIAL SEQUENCE
  Synthetic Construct
KKYRSK

SEQ ID NO: 23971 - protein, 6 aa, ARTIFICIAL SEQUENCE
  Synthetic Construct
KKYRTK

SEQ ID NO: 23972 - protein, 6 aa, ARTIFICIAL SEQUENCE
  Synthetic Construct
KKYRYK

SEQ ID NO: 23973 - protein, 6 aa, ARTIFICIAL SEQUENCE
  Synthetic Construct
KKYSAK

SEQ ID NO: 23974 - protein, 6 aa, ARTIFICIAL SEQUENCE
  Synthetic Construct
KKYSDK

SEQ ID NO: 23975 - protein, 6 aa, ARTIFICIAL SEQUENCE
  Synthetic Construct
KKYSEK

SEQ ID NO: 23976 - protein, 6 aa, ARTIFICIAL SEQUENCE
  Synthetic Construct
KKYSFK

SEQ ID NO: 23977 - protein, 6 aa, ARTIFICIAL SEQUENCE
  Synthetic Construct
KKYSGK

SEQ ID NO: 23978 - protein, 6 aa, ARTIFICIAL SEQUENCE
  Synthetic Construct
KKYSHK

SEQ ID NO: 23979 - protein, 6 aa, ARTIFICIAL SEQUENCE
  Synthetic Construct
KKYSIK

SEQ ID NO: 23980 - protein, 6 aa, ARTIFICIAL SEQUENCE
  Synthetic Construct
KKYSLK

SEQ ID NO: 23981 - protein, 6 aa, ARTIFICIAL SEQUENCE
  Synthetic Construct
KKYSNK

SEQ ID NO: 23982 - protein, 6 aa, ARTIFICIAL SEQUENCE
  Synthetic Construct
KKYSQK

SEQ ID NO: 23983 - protein, 6 aa, ARTIFICIAL SEQUENCE
  Synthetic Construct
KKYSRK

SEQ ID NO: 23984 - protein, 6 aa, ARTIFICIAL SEQUENCE
  Synthetic Construct
KKYSSK

SEQ ID NO: 23985 - protein, 6 aa, ARTIFICIAL SEQUENCE
  Synthetic Construct
KKYSTK

SEQ ID NO: 23986 - protein, 6 aa, ARTIFICIAL SEQUENCE
  Synthetic Construct
KKYSYK

SEQ ID NO: 23987 - protein, 6 aa, ARTIFICIAL SEQUENCE
  Synthetic Construct
KKYTAK

SEQ ID NO: 23988 - protein, 6 aa, ARTIFICIAL SEQUENCE
  Synthetic Construct
KKYTDK

SEQ ID NO: 23989 - protein, 6 aa, ARTIFICIAL SEQUENCE
  Synthetic Construct
KKYTEK

SEQ ID NO: 23990 - protein, 6 aa, ARTIFICIAL SEQUENCE
  Synthetic Construct
KKYTFK

SEQ ID NO: 23991 - protein, 6 aa, ARTIFICIAL SEQUENCE
  Synthetic Construct
KKYTGK

SEQ ID NO: 23992 - protein, 6 aa, ARTIFICIAL SEQUENCE
  Synthetic Construct
KKYTHK

SEQ ID NO: 23993 - protein, 6 aa, ARTIFICIAL SEQUENCE
  Synthetic Construct
KKYTIK

SEQ ID NO: 23994 - protein, 6 aa, ARTIFICIAL SEQUENCE
  Synthetic Construct
KKYTLK

SEQ ID NO: 23995 - protein, 6 aa, ARTIFICIAL SEQUENCE
  Synthetic Construct
KKYTNK

SEQ ID NO: 23996 - protein, 6 aa, ARTIFICIAL SEQUENCE
  Synthetic Construct
KKYTQK

SEQ ID NO: 23997 - protein, 6 aa, ARTIFICIAL SEQUENCE
  Synthetic Construct
KKYTRK

SEQ ID NO: 23998 - protein, 6 aa, ARTIFICIAL SEQUENCE
  Synthetic Construct
KKYTSK

SEQ ID NO: 23999 - protein, 6 aa, ARTIFICIAL SEQUENCE
  Synthetic Construct
KKYTTK

SEQ ID NO: 24000 - protein, 6 aa, ARTIFICIAL SEQUENCE
  Synthetic Construct
KKYTYK

SEQ ID NO: 24001 - protein, 6 aa, ARTIFICIAL SEQUENCE
  Synthetic Construct
KKYYAK

SEQ ID NO: 24002 - protein, 6 aa, ARTIFICIAL SEQUENCE
  Synthetic Construct
KKYYDK

SEQ ID NO: 24003 - protein, 6 aa, ARTIFICIAL SEQUENCE
  Synthetic Construct
KKYYEK

SEQ ID NO: 24004 - protein, 6 aa, ARTIFICIAL SEQUENCE
  Synthetic Construct
KKYYFK

SEQ ID NO: 24005 - protein, 6 aa, ARTIFICIAL SEQUENCE
  Synthetic Construct
KKYYGK

SEQ ID NO: 24006 - protein, 6 aa, ARTIFICIAL SEQUENCE
  Synthetic Construct
KKYYHK

SEQ ID NO: 24007 - protein, 6 aa, ARTIFICIAL SEQUENCE
  Synthetic Construct
KKYYIK

SEQ ID NO: 24008 - protein, 6 aa, ARTIFICIAL SEQUENCE
  Synthetic Construct
KKYYLK

SEQ ID NO: 24009 - protein, 6 aa, ARTIFICIAL SEQUENCE
  Synthetic Construct
KKYYNK

SEQ ID NO: 24010 - protein, 6 aa, ARTIFICIAL SEQUENCE
  Synthetic Construct
KKYYQK

SEQ ID NO: 24011 - protein, 6 aa, ARTIFICIAL SEQUENCE
  Synthetic Construct
KKYYRK

SEQ ID NO: 24012 - protein, 6 aa, ARTIFICIAL SEQUENCE
  Synthetic Construct
KKYYSK

SEQ ID NO: 24013 - protein, 6 aa, ARTIFICIAL SEQUENCE
  Synthetic Construct
KKYYTK

SEQ ID NO: 24014 - protein, 6 aa, ARTIFICIAL SEQUENCE
  Synthetic Construct
KKYYYK

SEQ ID NO: 24015 - protein, 33 aa, Artificial Sequence
  Synthetic Construct
  MISC_FEATURE (1)..(1): Xaa at position 1 is A, D, E, F, G, H, I, K, L, N, P, Q, R, S, T, V, Y, W, or absent
  MISC_FEATURE (2)..(2): Xaa at position 2 is A, D, E, F, G, H, I, K, L, N, P, Q, R, S, T, V, Y, W, or absent
  MISC_FEATURE (3)..(3): Xaa at position 3 is A, D, E, F, G, H, I, K, L, N, P, Q, R, S, T, V, Y, W, or absent
  MISC_FEATURE (4)..(4): Xaa at position 4 is A, D, E, F, G, H, I, K, L, N, P, Q, R, S, T, V, Y, W, or absent
  MISC_FEATURE (5)..(5): Xaa at position 5 is A, D, E, F, G, H, I, K, L, N, P, Q, R, S, T, V, Y, W, or absent
  MISC_FEATURE (6)..(6): Xaa at position 6 is A, D, E, F, G, H, I, K, L, N, P, Q, R, S, T, V, Y, W, or absent
  MISC_FEATURE (7)..(7): Xaa at position 7 is A, D, E, F, G, H, I, K, L, N, P, Q, R, S, T, V, Y, W, or absent
  MISC_FEATURE (13)..(13): Xaa at position 13 is A, D, E, F, G, H, I, K, L, N, P, Q, R, S, T, V, Y, W, or absent
  MISC_FEATURE (14)..(14): Xaa at position 14 is A, D, E, F, G, H, I, K, L, N, P, Q, R, S, T, V, Y, W, or absent
  MISC_FEATURE (27)..(27): Xaa at position 27 is A, D, E, F, G, H, I, K, L, N, P, Q, R, S, T, V, Y, W, or absent
  MISC_FEATURE (28)..(28): Xaa at position 28 is A, D, E, F, G, H, I, K, L, N, P, Q, R, S, T, V, Y, W, or absent
  MISC_FEATURE (29)..(29): Xaa at position 29 is A, D, E, F, G, H, I, K, L, N, P, Q, R, S, T, V, Y, W, or absent
  MISC_FEATURE (30)..(30): Xaa at position 30 is A, D, E, F, G, H, I, K, L, N, P, Q, R, S, T, V, Y, W, or absent
  MISC_FEATURE (31)..(31): Xaa at position 31 is A, D, E, F, G, H, I, K, L, N, P, Q, R, S, T, V, Y, W, or absent
  MISC_FEATURE (32)..(32): Xaa at position 32 is A, D, E, F, G, H, I, K, L, N, P, Q, R, S, T, V, Y, W, or absent
  MISC_FEATURE (33)..(33): Xaa at position 33 is A, D, E, F, G, H, I, K, L, N, P, Q, R, S, T, V, Y, W, or absent
XXXXXXXVEQCCXXICSLYQLENYCNXXXXXXX

SEQ ID NO: 24016 - protein, 46 aa, Artificial Sequence
  Synthetic Construct
  MISC_FEATURE (1)..(1): Xaa at position 1 is A, D, E, F, G, H, I, K, L, N, P, Q, R, S, T, V, Y, W, or absent
  MISC_FEATURE (2)..(2): Xaa at position 2 is A, D, E, F, G, H, I, K, L, N, P, Q, R, S, T, V, Y, W, or absent
  MISC_FEATURE (3)..(3): Xaa at position 3 is A, D, E, F, G, H, I, K, L, N, P, Q, R, S, T, V, Y, W, or absent
  MISC_FEATURE (4)..(4): Xaa at position 4 is A, D, E, F, G, H, I, K, L, N, P, Q, R, S, T, V, Y, W, or absent
  MISC_FEATURE (6)..(6): Xaa at position 6 is A, D, E, F, G, H, I, K, L, N, P, Q, R, S, T, V, Y, W, or absent
  MISC_FEATURE (7)..(7): Xaa at position 7 is A, D, E, F, G, H, I, K, L, N, P, Q, R, S, T, V, Y, W, or absent
  MISC_FEATURE (8)..(8): Xaa at position 8 is A, D, E, F, G, H, I, K, L, N, P, Q, R, S, T, V, Y, W, or absent
  MISC_FEATURE (9)..(9): Xaa at position 9 is A, D, E, F, G, H, I, K, L, N, P, Q, R, S, T, V, Y, W, or absent
  MISC_FEATURE (10)..(10): Xaa at position 10 is A, D, E, F, G, H, I, K, L, N, P, Q, R, S, T, V, Y, W, or absent
  MISC_FEATURE (11)..(11): Xaa at position 11 is A, D, E, F, G, H, I, K, L, N, P, Q, R, S, T, V, Y, W, or absent
  MISC_FEATURE (13)..(13): Xaa at position 13 is A, D, E, F, G, H, I, K, L, N, P, Q, R, S, T, V, Y, W, or absent
  MISC_FEATURE (14)..(14): Xaa at position 14 is A, D, E, F, G, H, I, K, L, N, P, Q, R, S, T, V, Y, W, or absent
  MISC_FEATURE (15)..(15): Xaa at position 15 is A, D, E, F, G, H, I, K, L, N, P, Q, R, S, T, V, Y, W, or absent
  MISC_FEATURE (16)..(16): Xaa at position 16 is A, D, E, F, G, H, I, K, L, N, P, Q, R, S, T, V, Y, W, or absent
  MISC_FEATURE (33)..(33): Xaa at position 33 is A, D, E, F, G, H, I, K, L, N, P, Q, R, S, T, V, Y, W, or absent
  MISC_FEATURE (34)..(34): Xaa at position 34 is A, D, E, F, G, H, I, K, L, N, P, Q, R, S, T, V, Y, W, or absent
  MISC_FEATURE (35)..(35): Xaa at position 35 is A, D, E, F, G, H, I, K, L, N, P, Q, R, S, T, V, Y, W, or absent
  MISC_FEATURE (41)..(41): Xaa at position 41 is A, D, E, F, G, H, I, K, L, N, P, Q, R, S, T, V, Y, W, or absent
  MISC_FEATURE (42)..(42): Xaa at position 42 is A, D, E, F, G, H, I, K, L, N, P, Q, R, S, T, V, Y, W, or absent
  MISC_FEATURE (43)..(43): Xaa at position 43 is A, D, E, F, G, H, I, K, L, N, P, Q, R, S, T, V, Y, W, or absent
  MISC_FEATURE (44)..(44): Xaa at position 44 is A, D, E, F, G, H, I, K, L, N, P, Q, R, S, T, V, Y, W, or absent
  MISC_FEATURE (45)..(45): Xaa at position 45 is A, D, E, F, G, H, I, K, L, N, P, Q, R, S, T, V, Y, W, or absent
  MISC_FEATURE (46)..(46): Xaa at position 46 is A, D, E, F, G, H, I, K, L, N, P, Q, R, S, T, V, Y, W, or absent
XXXXKXXXXXXKXXXXQHLCGSHLVEALYLVCXXXGFFYTXXXXXX

SEQ ID NO: 24017 - protein, 46 aa, Artificial Sequence
  Synthetic Construct
  MISC_FEATURE (1)..(1): Xaa at position 1 is A, D, E, F, G, H, I, K, L, N, P, Q, R, S, T, V, Y, W, or absent
  MISC_FEATURE (2)..(2): Xaa at position 2 is A, D, E, F, G, H, I, K, L, N, P, Q, R, S, T, V, Y, W, or absent
  MISC_FEATURE (3)..(3): Xaa at position 3 is A, D, E, F, G, H, I, K, L, N, P, Q, R, S, T, V, Y, W, or absent
  MISC_FEATURE (4)..(4): Xaa at position 4 is A, D, E, F, G, H, I, K, L, N, P, Q, R, S, T, V, Y, W, or absent
  MISC_FEATURE (7)..(7): Xaa at position 7 is A, E, F, H, I, K, L, N, P, Q, R, S, T, V, Y, W, or absent
  MISC_FEATURE (8)..(8): Xaa at position 8 is A, D, E, F, G, H, I, K, L, N, P, Q, R, S, T, V, Y, W, or absent
  MISC_FEATURE (9)..(9): Xaa at position 9 is A, D, E, F, G, H, I, K, L, N, P, Q, R, S, T, V, Y, W, or absent
  MISC_FEATURE (10)..(10): Xaa at position 10 is A, D, E, F, G, H, I, K, L, N, P, Q, R, S, T, V, Y, W, or absent
  MISC_FEATURE (11)..(11): Xaa at position 11 is A, D, E, F, G, H, I, K, L, N, P, Q, R, S, T, V, Y, W, or absent
  MISC_FEATURE (12)..(12): Xaa at position 12 is A, D, E, F, G, H, I, K, L, N, P, Q, R, S, T, V, Y, W, or absent
  MISC_FEATURE (13)..(13): Xaa at position 13 is A, D, E, F, G, H, I, K, L, N, P, Q, R, S, T, V, Y, W, or absent
  MISC_FEATURE (14)..(14): Xaa at position 14 is A, D, E, F, G, H, I, K, L, N, P, Q, R, S, T, V, Y, W, or absent
  MISC_FEATURE (15)..(15): Xaa at position 15 is A, D, E, F, G, H, I, K, L, N, P, Q, R, S, T, V, Y, W, or absent
  MISC_FEATURE (16)..(16): Xaa at position 16 is A, D, E, F, G, H, I, K, L, N, P, Q, R, S, T, V, Y, W, or absent
  MISC_FEATURE (33)..(33): Xaa at position 33 is A, D, E, F, G, H, I, K, L, N, P, Q, R, S, T, V, Y, W, or absent
  MISC_FEATURE (34)..(34): Xaa at position 34 is A, D, E, F, G, H, I, K, L, N, P, Q, R, S, T, V, Y, W, or absent
  MISC_FEATURE (35)..(35): Xaa at position 35 is A, D, E, F, G, H, I, K, L, N, P, Q, R, S, T, V, Y, W, or absent
  MISC_FEATURE (41)..(41): Xaa at position 41 is A, D, E, F, G, H, I, K, L, N, P, Q, R, S, T, V, Y, W, or absent
  MISC_FEATURE (42)..(42): Xaa at position 42 is A, D, E, F, G, H, I, K, L, N, P, Q, R, S, T, V, Y, W, or absent
  MISC_FEATURE (43)..(43): Xaa at position 43 is A, D, E, F, G, H, I, K, L, N, P, Q, R, S, T, V, Y, W, or absent
  MISC_FEATURE (44)..(44): Xaa at position 44 is A, D, E, F, G, H, I, K, L, N, P, Q, R, S, T, V, Y, W, or absent
  MISC_FEATURE (45)..(45): Xaa at position 45 is A, D, E, F, G, H, I, K, L, N, P, Q, R, S, T, V, Y, W, or absent
  MISC_FEATURE (46)..(46): Xaa at position 46 is A, D, E, F, G, H, I, K, L, N, P, Q, R, S, T, V, Y, W, or absent
XXXXKPXXXXXXXXXXQHLCGSHLVEALYLVCXXXGFFYTXXXXXX

SEQ ID NO: 24018 - protein, 46 aa, Artificial Sequence; identical to SEQ ID NO: 24016
  Synthetic Construct
  MISC_FEATURE (1)..(1): Xaa at position 1 is A, D, E, F, G, H, I, K, L, N, P, Q, R, S, T, V, Y, W, or absent
  MISC_FEATURE (2)..(2): Xaa at position 2 is A, D, E, F, G, H, I, K, L, N, P, Q, R, S, T, V, Y, W, or absent
  MISC_FEATURE (3)..(3): Xaa at position 3 is A, D, E, F, G, H, I, K, L, N, P, Q, R, S, T, V, Y, W, or absent
  MISC_FEATURE (4)..(4): Xaa at position 4 is A, D, E, F, G, H, I, K, L, N, P, Q, R, S, T, V, Y, W, or absent
  MISC_FEATURE (6)..(6): Xaa at position 6 is A, D, E, F, G, H, I, K, L, N, P, Q, R, S, T, V, Y, W, or absent
  MISC_FEATURE (6)..(11): wherein at least one of Xaa at positions 6, 7, 8, 9, 10, 11 is present and at least one of Xaa at positions 6, 7, 8, 9, 10, 11 is G
  MISC_FEATURE (7)..(7): Xaa at position 7 is A, D, E, F, G, H, I, K, L, N, P, Q, R, S, T, V, Y, W, or absent
  MISC_FEATURE (8)..(8): Xaa at position 8 is A, D, E, F, G, H, I, K, L, N, P, Q, R, S, T, V, Y, W, or absent
  MISC_FEATURE (9)..(9): Xaa at position 9 is A, D, E, F, G, H, I, K, L, N, P, Q, R, S, T, V, Y, W, or absent
  MISC_FEATURE (10)..(10): Xaa at position 10 is A, D, E, F, G, H, I, K, L, N, P, Q, R, S, T, V, Y, W, or absent
  MISC_FEATURE (11)..(11): Xaa at position 11 is A, D, E, F, G, H, I, K, L, N, P, Q, R, S, T, V, Y, W, or absent
  MISC_FEATURE (13)..(13): Xaa at position 13 is A, D, E, F, G, H, I, K, L, N, P, Q, R, S, T, V, Y, W, or absent
  MISC_FEATURE (14)..(14): Xaa at position 14 is A, D, E, F, G, H, I, K, L, N, P, Q, R, S, T, V, Y, W, or absent
  MISC_FEATURE (15)..(15): Xaa at position 15 is A, D, E, F, G, H, I, K, L, N, P, Q, R, S, T, V, Y, W, or absent
  MISC_FEATURE (16)..(16): Xaa at position 16 is A, D, E, F, G, H, I, K, L, N, P, Q, R, S, T, V, Y, W, or absent
  MISC_FEATURE (33)..(33): Xaa at position 33 is A, D, E, F, G, H, I, K, L, N, P, Q, R, S, T, V, Y, W, or absent
  MISC_FEATURE (34)..(34): Xaa at position 34 is A, D, E, F, G, H, I, K, L, N, P, Q, R, S, T, V, Y, W, or absent
  MISC_FEATURE (35)..(35): Xaa at position 35 is A, D, E, F, G, H, I, K, L, N, P, Q, R, S, T, V, Y, W, or absent
  MISC_FEATURE (41)..(41): Xaa at position 41 is A, D, E, F, G, H, I, K, L, N, P, Q, R, S, T, V, Y, W, or absent
  MISC_FEATURE (42)..(42): Xaa at position 42 is A, D, E, F, G, H, I, K, L, N, P, Q, R, S, T, V, Y, W, or absent
  MISC_FEATURE (43)..(43): Xaa at position 43 is A, D, E, F, G, H, I, K, L, N, P, Q, R, S, T, V, Y, W, or absent
  MISC_FEATURE (44)..(44): Xaa at position 44 is A, D, E, F, G, H, I, K, L, N, P, Q, R, S, T, V, Y, W, or absent
  MISC_FEATURE (45)..(45): Xaa at position 45 is A, D, E, F, G, H, I, K, L, N, P, Q, R, S, T, V, Y, W, or absent
  MISC_FEATURE (46)..(46): Xaa at position 46 is A, D, E, F, G, H, I, K, L, N, P, Q, R, S, T, V, Y, W, or absent

SEQ ID NO: 24019 - protein, 46 aa, Artificial Sequence; identical to SEQ ID NO: 24016
  Synthetic Construct
  MISC_FEATURE (1)..(1): Xaa at position 1 is A, D, E, F, G, H, I, K, L, N, P, Q, R, S, T, V, Y, W, or absent
  MISC_FEATURE (2)..(2): Xaa at position 2 is A, D, E, F, G, H, I, K, L, N, P, Q, R, S, T, V, Y, W, or absent
  MISC_FEATURE (3)..(3): Xaa at position 3 is A, D, E, F, G, H, I, K, L, N, P, Q, R, S, T, V, Y, W, or absent
  MISC_FEATURE (4)..(4): Xaa at position 4 is A, D, E, F, G, H, I, K, L, N, P, Q, R, S, T, V, Y, W, or absent
  MISC_FEATURE (6)..(6): Xaa at position 6 is A, D, E, F, G, H, I, K, L, N, P, Q, R, S, T, V, Y, W, or absent
  MISC_FEATURE (6)..(11): wherein at least one of Xaa at positions 6, 7, 8, 9, 10, 11 is present and at least one of Xaa at positions 6, 7, 8, 9, 10, 11 is S
  MISC_FEATURE (7)..(7): Xaa at position 7 is A, D, E, F, G, H, I, K, L, N, P, Q, R, S, T, V, Y, W, or absent
  MISC_FEATURE (8)..(8): Xaa at position 8 is A, D, E, F, G, H, I, K, L, N, P, Q, R, S, T, V, Y, W, or absent
  MISC_FEATURE (9)..(9): Xaa at position 9 is A, D, E, F, G, H, I, K, L, N, P, Q, R, S, T, V, Y, W, or absent
  MISC_FEATURE (10)..(10): Xaa at position 10 is A, D, E, F, G, H, I, K, L, N, P, Q, R, S, T, V, Y, W, or absent
  MISC_FEATURE (11)..(11): Xaa at position 11 is A, D, E, F, G, H, I, K, L, N, P, Q, R, S, T, V, Y, W, or absent
  MISC_FEATURE (13)..(13): Xaa at position 13 is A, D, E, F, G, H, I, K, L, N, P, Q, R, S, T, V, Y, W, or absent
  MISC_FEATURE (14)..(14): Xaa at position 14 is A, D, E, F, G, H, I, K, L, N, P, Q, R, S, T, V, Y, W, or absent
  MISC_FEATURE (15)..(15): Xaa at position 15 is A, D, E, F, G, H, I, K, L, N, P, Q, R, S, T, V, Y, W, or absent
  MISC_FEATURE (16)..(16): Xaa at position 16 is A, D, E, F, G, H, I, K, L, N, P, Q, R, S, T, V, Y, W, or absent
  MISC_FEATURE (33)..(33): Xaa at position 33 is A, D, E, F, G, H, I, K, L, N, P, Q, R, S, T, V, Y, W, or absent
  MISC_FEATURE (34)..(34): Xaa at position 34 is A, D, E, F, G, H, I, K, L, N, P, Q, R, S, T, V, Y, W, or absent
  MISC_FEATURE (35)..(35): Xaa at position 35 is A, D, E, F, G, H, I, K, L, N, P, Q, R, S, T, V, Y, W, or absent
  MISC_FEATURE (41)..(41): Xaa at position 41 is A, D, E, F, G, H, I, K, L, N, P, Q, R, S, T, V, Y, W, or absent
  MISC_FEATURE (42)..(42): Xaa at position 42 is A, D, E, F, G, H, I, K, L, N, P, Q, R, S, T, V, Y, W, or absent
  MISC_FEATURE (43)..(43): Xaa at position 43 is A, D, E, F, G, H, I, K, L, N, P, Q, R, S, T, V, Y, W, or absent
  MISC_FEATURE (44)..(44): Xaa at position 44 is A, D, E, F, G, H, I, K, L, N, P, Q, R, S, T, V, Y, W, or absent
  MISC_FEATURE (45)..(45): Xaa at position 45 is A, D, E, F, G, H, I, K, L, N, P, Q, R, S, T, V, Y, W, or absent
  MISC_FEATURE (46)..(46): Xaa at position 46 is A, D, E, F, G, H, I, K, L, N, P, Q, R, S, T, V, Y, W, or absent

SEQ ID NO: 24020 - protein, 46 aa, Artificial Sequence; identical to SEQ ID NO: 24016
  Synthetic Construct
  MISC_FEATURE (1)..(1): Xaa at position 1 is A, D, E, F, G, H, I, K, L, N, P, Q, R, S, T, V, Y, W, or absent
  MISC_FEATURE (2)..(2): Xaa at position 2 is A, D, E, F, G, H, I, K, L, N, P, Q, R, S, T, V, Y, W, or absent
  MISC_FEATURE (3)..(3): Xaa at position 3 is A, D, E, F, G, H, I, K, L, N, P, Q, R, S, T, V, Y, W, or absent
  MISC_FEATURE (4)..(4): Xaa at position 4 is A, D, E, F, G, H, I, K, L, N, P, Q, R, S, T, V, Y, W, or absent
  MISC_FEATURE (6)..(6): Xaa at position 6 is A, D, E, F, G, H, I, K, L, N, P, Q, R, S, T, V, Y, W, or absent
  MISC_FEATURE (6)..(11): wherein at least two of Xaa at positions 6, 7, 8, 9, 10, 11 are present and at least one of Xaa at positions 6, 7, 8, 9, 10, 11 is S and another is G
  MISC_FEATURE (7)..(7): Xaa at position 7 is A, D, E, F, G, H, I, K, L, N, P, Q, R, S, T, V, Y, W, or absent
  MISC_FEATURE (8)..(8): Xaa at position 8 is A, D, E, F, G, H, I, K, L, N, P, Q, R, S, T, V, Y, W, or absent
  MISC_FEATURE (9)..(9): Xaa at position 9 is A, D, E, F, G, H, I, K, L, N, P, Q, R, S, T, V, Y, W, or absent
  MISC_FEATURE (10)..(10): Xaa at position 10 is A, D, E, F, G, H, I, K, L, N, P, Q, R, S, T, V, Y, W, or absent
  MISC_FEATURE (11)..(11): Xaa at position 11 is A, D, E, F, G, H, I, K, L, N, P, Q, R, S, T, V, Y, W, or absent
  MISC_FEATURE (13)..(13): Xaa at position 13 is A, D, E, F, G, H, I, K, L, N, P, Q, R, S, T, V, Y, W, or absent
  MISC_FEATURE (14)..(14): Xaa at position 14 is A, D, E, F, G, H, I, K, L, N, P, Q, R, S, T, V, Y, W, or absent
  MISC_FEATURE (15)..(15): Xaa at position 15 is A, D, E, F, G, H, I, K, L, N, P, Q, R, S, T, V, Y, W, or absent
  MISC_FEATURE (16)..(16): Xaa at position 16 is A, D, E, F, G, H, I, K, L, N, P, Q, R, S, T, V, Y, W, or absent
  MISC_FEATURE (33)..(33): Xaa at position 33 is A, D, E, F, G, H, I, K, L, N, P, Q, R, S, T, V, Y, W, or absent
  MISC_FEATURE (34)..(34): Xaa at position 34 is A, D, E, F, G, H, I, K, L, N, P, Q, R, S, T, V, Y, W, or absent
  MISC_FEATURE (35)..(35): Xaa at position 35 is A, D, E, F, G, H, I, K, L, N, P, Q, R, S, T, V, Y, W, or absent
  MISC_FEATURE (41)..(41): Xaa at position 41 is A, D, E, F, G, H, I, K, L, N, P, Q, R, S, T, V, Y, W, or absent
  MISC_FEATURE (42)..(42): Xaa at position 42 is A, D, E, F, G, H, I, K, L, N, P, Q, R, S, T, V, Y, W, or absent
  MISC_FEATURE (43)..(43): Xaa at position 43 is A, D, E, F, G, H, I, K, L, N, P, Q, R, S, T, V, Y, W, or absent
  MISC_FEATURE (44)..(44): Xaa at position 44 is A, D, E, F, G, H, I, K, L, N, P, Q, R, S, T, V, Y, W, or absent
  MISC_FEATURE (45)..(45): Xaa at position 45 is A, D, E, F, G, H, I, K, L, N, P, Q, R, S, T, V, Y, W, or absent
  MISC_FEATURE (46)..(46): Xaa at position 46 is A, D, E, F, G, H, I, K, L, N, P, Q, R, S, T, V, Y, W, or absent

SEQ ID NO: 24021 - protein, 6 aa, Artificial Sequence
  Synthetic Construct
  MOD_RES (1)..(2): Xaa at positions 1 and 2 is K or KP
  MOD_RES (1)..(6): SEQ ID NO:24246 is (X-A1-A2-X)m wherein m is 1-4 and the epsilon amine group of at least one lysine side chain in positions 1 or 4 is conjugated as described by Formula I
  MOD_RES (3)..(3): Xaa at position 3 is a L- or D-amino acid, wherein Xaa is Any amino acid
  MOD_RES (4)..(4): Xaa at position 4 is a L- or D-amino acid, wherein Xaa is Any amino acid
  MOD_RES (5)..(6): Xaa at positions 5 and 6 is K or KP
XXXXXX

SEQ ID NO: 24022 - protein, 7 aa, Artificial Sequence
  Synthetic Construct
  MOD_RES (1)..(2): Xaa at positions 1 and 2 is K or KP
  MOD_RES (1)..(7): SEQ ID NO:24247 is (X-A1-A2-A3-X)m wherein m is 1-4 and the epsilon amine group of at least one lysine side chain in positions 1 or 5 is conjugated as described by Formula I
  MOD_RES (3)..(3): Xaa at position 3 is L- or D-amino acid, wherein Xaa is Any amino acid
  MOD_RES (4)..(4): Xaa at position 4 is L- or D-amino acid, wherein Xaa is Any amino acid
  MOD_RES (5)..(5): Xaa at position 5 is L- or D-amino acid, wherein Xaa is Any amino acid
  MOD_RES (6)..(7): Xaa at positions 6 and 7 is K or KP
XXXXXXX

SEQ ID NO: 24023 - protein, 10 aa, Artificial Sequence
  Synthetic Construct
  MOD_RES (1)..(2): Xaa at positions 1 and 2 is K or KP
  MOD_RES (1)..(10): SEQ ID NO:24248 is (X-A1-X)m(GGGGS)n wherein m is 1-4, n is 1 to 4, and the epsilon amine group of at least one lysine side chain in positions 1 or 3 is conjugated as described by Formula I
  MOD_RES (3)..(3): Xaa at position 3 is a L- or D-amino acid, wherein Xaa is Any amino acid
  MOD_RES (4)..(5): Xaa at positions 4 and 5 is K or KP
XXXXXGGGGS

SEQ ID NO: 24024 - protein, 11 aa, Artificial Sequence
  Synthetic Construct
  MOD_RES (1)..(2): Xaa at positions 1 and 2 is K or KP
  MOD_RES (1)..(11): SEQ ID NO:24249 is (X-A1-A2-X)m(GGGGS)n wherein m is 1-4, n is 1-4 and the epsilon amine group of at least one lysine side chain in positions 1 or 4 is conjugated as described by Formula I
  MOD_RES (3)..(3): Xaa at position 3 a L- or D-amino acid, wherein Xaa is Any amino acid
  MOD_RES (4)..(4): Xaa at position 4 a L- or D-amino acid, wherein Xaa is Any amino acid
  MOD_RES (5)..(6): Xaa at positions 5 and 6 is K or KP
XXXXXXGGGGS

SEQ ID NO: 24025 - protein, 12 aa, Artificial Sequence
  Synthetic Construct
  MOD_RES (1)..(2): Xaa at positions 1 and 2 is K or KP
  MOD_RES (1)..(12): SEQ ID NO:24250 is (X-A1-A2-A3-X)m(GGGGS)n wherein m is 1-4, n is 1-4 and the epsilon amine group of at least one lysine side chain in positions 1 or 5 is conjugated as described by Formula I
  MOD_RES (3)..(3): Xaa at position 3 is a L- or D-amino acid, wherein Xaa is Any amino acid
  MOD_RES (4)..(4): Xaa at position 4 is a L- or D-amino acid, wherein Xaa is Any amino acid
  MOD_RES (5)..(5): Xaa at position 5 is a L- or D-amino acid, wherein Xaa is Any amino acid
  MOD_RES (6)..(7): Xaa at positions 6 and 7 is K or KP
XXXXXXXGGGGS

SEQ ID NO: 24026 - protein, 16 aa, Artificial Sequence
  Synthetic Construct
  MOD_RES (1)..(2): Xaa at positions 1 and 2 is K or KP
  MOD_RES (1)..(16): SEQ ID NO:24251 is (X-A1-X)m(GGGGS)n(X-A2-X)o wherein m is 1-4, n is 1-4, n is 1-4, and the epsilon amine group of at least one lysine side chain in positions 1, 3, 9 or 11 is conjugated as described by Formula I
  MOD_RES (3)..(3): Xaa at position 3 is a L- or D-amino acid, wherein Xaa is Any amino acid
  MOD_RES (4)..(5): Xaa at positions 4 and 5 is K or KP
  MOD_RES (11)..(12): Xaa at positions 11 and 12 is K or KP
  MOD_RES (13)..(14): Xaa at positions 13 and 14 is K or KP
  MOD_RES (15)..(16): Xaa at positions 15 and 16 is K or KP
XXXXXGGGGSXXXXXX

SEQ ID NO: 24027 - protein, 17 aa, Artificial Sequence
  Synthetic Construct
  MOD_RES (1)..(2): Xaa at positions 1 and 2 is K or KP
  MOD_RES (1)..(17): SEQ ID NO:24252 is (X-A1-A2-X)m(GGGGS)n(X-A3-A4-X)o wherein m is 1-4, n is 1-4, o is 1-4, and the epsilon amine group of at least one lysine side chain in positions 1, 4, 9 or 13 is conjugated as described by Formula I
  MOD_RES (3)..(3): Xaa at position 3 is a L- or D-amino acid, wherein Xaa is Any amino acid
  MOD_RES (4)..(4): Xaa at position 4 is a L- or D-amino acid, wherein Xaa is Any amino acid
  MOD_RES (5)..(6): Xaa at positions 5 and 6 is K or KP
  MOD_RES (12)..(13): Xaa at positions 12 and 13 is K or KP
  MOD_RES (14)..(14): Xaa at position 14 is a L- or D-amino acid, wherein Xaa is Any amino acid
  MOD_RES (15)..(15): Xaa at position 15 is a L- or D-amino acid, wherein Xaa is Any amino acid
  MOD_RES (16)..(17): Xaa at positions 16 and 17 is K or KP
XXXXXXGGGGSXXXXXX

SEQ ID NO: 24028 - protein, 36 aa, Artificial Sequence
  Synthetic Construct
  MOD_RES (1)..(36): SEQ ID NO:24253 is (GX-A1-KGE-A2-XT)m(GGSGSSS)n(GXGX-A3-GSSSGSSSXT)o wherein m is 1-4, n is 1-4, o is 1-4, and the epsilon amine group of at least one lysine side chain in positions 2, 8, 18, 20, or 30 is
  MOD_RES (2)..(3): Xaa at positions 2 and 3 is KV or KP
  MOD_RES (4)..(4): Xaa at position 4 is a L- or D-amino acid, wherein Xaa is Any amino acid
  MOD_RES (8)..(8): Xaa at position 8 is a L- or D-amino acid, wherein Xaa is Any amino acid
  MOD_RES (9)..(10): Xaa at positions 9 and 10 is KV or KP
  MOD_RES (20)..(21): Xaa at positions 20 and 21 is KV or KP
  MOD_RES (23)..(24): Xaa at positions 23 and 24 is KV or KP
  MOD_RES (25)..(25): Xaa at position 25 is a L- or D-amino acid, wherein Xaa is Any amino acid
  MOD_RES (34)..(35): Xaa at positions 34 and 35 is KV or KP
GXXXKGEXXXTGGSGSSSGXXGXXXGSSSGSSSXXT

SEQ ID NO: 24029 - protein, 10 aa, Artificial Sequence
  Synthetic Construct
  MOD_RES (1)..(10): SEQ ID NO:24254 is (GX-A1-ES-A2-LYL)m wherein m is 1-4 and the epsilon amine group of at least one lysine side chain in position 2 is conjugated as described by Formula I
  MOD_RES (2)..(3): Xaa at positions 2 and 3 is KV or KP
  MOD_RES (4)..(4): Xaa at position 4 is a L- or D-amino acid, wherein Xaa is Any amino acid
  MOD_RES (7)..(7): Xaa at position 7 is a L- or D-amino acid, wherein Xaa is Any amino acid
GXXXESXLYL

SEQ ID NO: 24030 - protein, 10 aa, Artificial Sequence
  Synthetic Construct
  MOD_RES (1)..(10): SEQ ID NO:24255 is (TXEX)m(GPGS)n wherein m is 1-4, n is 1-4, and the epsilon amine group of at least one lysine side chain in positions 2 or 4 is conjugated as described by Formula I
  MOD_RES (2)..(3): Xaa at positions 2 and 3 is KV or KP
  MOD_RES (5)..(6): Xaa at positions 5 and 6 is KV or KP
TXXEXXGPGS

SEQ ID NO: 24031 - protein, 11 aa, Artificial Sequence
  Synthetic Construct
  MOD_RES (1)..(11): SEQ ID NO:24256 is (GXES-A1-VA)m(K-A2-K)n wherein m is 1-4, n is 1-4, and the epsilon amine group of at least one lysine side chain in positions 5 or 9 is conjugated as described by Formula I
  MOD_RES (2)..(3): Xaa at positions 2 and 3 is KV or KP
  MOD_RES (6)..(6): Xaa at position 6 is a L- or D-amino acid, wherein Xaa is Any amino acid
  MOD_RES (10)..(10): Xaa at position 10 is a L- or D-amino acid, wherein Xaa is Any amino acid
GXXESXVAKXK

SEQ ID NO: 24032 - protein, 17 aa, Artificial Sequence
  Synthetic Construct
  MOD_RES (1)..(17): SEQ ID NO:24257 is (GXE-A1-A2)m(GGS)n(TY-A3-XXT)o wherein m is 1-4, n is 1-4, o is 1-4, and the epsilon amine group of at least one lysine side chain in positions 4, 5, or 11 is conjugated as described by Formula I
  MOD_RES (2)..(3): Xaa at positions 2 and 3 is KV or KP
  MOD_RES (5)..(5): Xaa at position 5 is a L- or D-amino acid, wherein Xaa is Any amino acid
  MOD_RES (6)..(6): Xaa at position 6 is a L- or D-amino acid, wherein Xaa is Any amino acid
  MOD_RES (12)..(12): Xaa at position 12 is a L- or D-amino acid, wherein Xaa is Any amino acid
  MOD_RES (13)..(14): Xaa at positions 13 and 14 is KV or KP
  MOD_RES (15)..(16): Xaa at positions 15 and 16 is KV or KP
GXXEXXGGSTYXXXXXT

SEQ ID NO: 24033 - protein, 12 aa, Artificial Sequence
  Synthetic Construct
  MOD_RES (1)..(12): SEQ ID NO:24258 is (TXAXYT)m(TSSS)n wherein m is 1-4, n is 1-4, and the epsilon amine group of at least one lysine side chain in positions 2 or 4 is conjugated as described by Formula I
  MOD_RES (2)..(3): Xaa at positions 2 and 3 is KV or KP
  MOD_RES (5)..(6): Xaa at positions 5 and 6 is KV or KP
TXXAXXYTTSSS

SEQ ID NO: 24034 - protein, 20 aa, Artificial Sequence
  Synthetic Construct
  MOD_RES (1)..(20): SEQ ID NO:24259 is (TKPY-A1-KEVET-A2-GSGS)m(GGGGS)n wherein m is 1-4, n is 1-4, and the epsilon amine group of at least one lysine side chain in positions 5 or 11 is conjugated as described by Formula I
  MOD_RES (5)..(5): Xaa at position 5 is a L- or D-amino acid, wherein Xaa is Any amino acid
  MOD_RES (11)..(11): Xaa at position 11 is a L- or D-amino acid, wherein Xaa is Any amino acid
TKPYXKEVETXGSGSGGGGS

SEQ ID NO: 24035 - protein, 38 aa, Artificial Sequence
  Synthetic Construct
  MOD_RES (1)..(38): SEQ ID NO:24250 is (YTPLE-A1-KPYSTSYKPYSE-A1-L)m(GKPTSLE-A2-FLVE-A2-LYTKP)n wherein m is 1-4, n is 1-4, and the epsilon amine group of at least one lysine side chain in positions 6, 19, or 38 is conjugated as
  MOD_RES (6)..(6): Xaa at position 6 is a L- or D-amino acid, wherein Xaa is Any amino acid
  MOD_RES (19)..(19): Xaa at position 19 is a L- or D-amino acid, wherein Xaa is Any amino acid
  MOD_RES (28)..(28): Xaa at position 28 is a L- or D-amino acid, wherein Xaa is Any amino acid
  MOD_RES (33)..(33): Xaa at position 33 is a L- or D-amino acid, wherein Xaa is Any amino acid
YTPLEXKPYSTSYKPYSEXLGKPTSLEXFLVEXLYTKP

SEQ ID NO: 24036 - protein, 62 aa, Artificial Sequence
  Synthetic Construct
  MISC_FEATURE (1)..(62): SEQ ID NO:24261 is (GKEALYLTPLESALYKP)m-(TKPLEALYLKPEILSLKPESLA)n-(GKPGSSSKPDTSSSGTP KTAAGS)o, wherein m is 1-4 and n is 1-4 and the epsilon amino group of at least one K is conjugated as described by Formula I
GKEALYLTPLESALYKPTKPLEALYLKPEILSLKPESLAGKPGSSSKPDTSSSGTPKTAAGS

SEQ ID NO: 24037 - protein, 7 aa, Artificial Sequence
  Synthetic Construct
KSNAPQK

SEQ ID NO: 24038 - protein, 7 aa, Artificial Sequence
  Synthetic Construct
KNASPQK

SEQ ID NO: 24039 - protein, 6 aa, Artificial Sequence
  Synthetic Construct
KLWAVK

SEQ ID NO: 24040 - protein, 6 aa, Artificial Sequence
  Synthetic Construct
KGARLK

SEQ ID NO: 24041 - protein, 7 aa, Artificial Sequence
  Synthetic Construct
ADKKTLN

SEQ ID NO: 24042 - protein, 8 aa, Artificial Sequence
  Synthetic Construct
GSHKGSHK

SEQ ID NO: 24043 - protein, 7 aa, Artificial Sequence
  Synthetic Construct
GKPSHKP

SEQ ID NO: 24044 - protein, 6 aa, Artificial Sequence
  Synthetic Construct
GKGPSK

SEQ ID NO: 24045 - protein, 6 aa, Artificial Sequence
  Synthetic Construct
GKGSKK

SEQ ID NO: 24046 - protein, 7 aa, Artificial Sequence
  Synthetic Construct
GKKPGKK

SEQ ID NO: 24047 - protein, 30 aa, Artificial Sequence
  Synthetic Construct
FVNQHLCGSHLVEALYLVCGKRGFFYTPKT

SEQ ID NO: 24048 - protein, 29 aa, Artificial Sequence
  Synthetic Construct
FVNQHLCGSHLVEALYLVCGKRGFFYTPR

SEQ ID NO: 24049 - protein, 4 aa, Artificial Sequence
  Synthetic Construct
KGSH

SEQ ID NO: 24050 - protein, 5 aa, Artificial Sequence
  Synthetic Construct
GKGSH

1. A compound comprising X1 and one or more Z1c, or a tautomer, stereoisomer or a mixture of stereoisomers, or a pharmaceutically acceptable salt, or hydrate, or isotopic derivative thereof,
wherein:
X1 comprises:
(i) NH₂ or OH;
(ii) a drug substance comprising an amine;
(iii) a drug substance that is covalently conjugated to an amine containing linker; or
(iv) an amine configured to be covalently conjugated to a drug substance;
wherein each Z1c is independently selected from Formulae FF1-FF224;
wherein each Z1c is covalently conjugated, directly or indirectly, to an amine in X1 or to OH when X1 is OH, and
wherein Formulae FF1-FF48 are: [chemical structure] [chemical structure] [chemical structure] [chemical structure] [chemical structure] [chemical structure]
wherein X represents a point of covalent attachment either directly to an amine in X1 or to an amine that is covalently conjugated directly or indirectly to X1, or to OH when X1 is OH;
i is 1, 2, 3, 4, 5, 6, or 7;
j is 1, 2, 3, 4, 5, 6, or 7; and
B₁ and B₂, which may be identical or different, each independently represents an aromatic boron-containing group;
wherein Formulae FF49-FF88 are: [chemical structure] [chemical structure] [chemical structure] [chemical structure] [chemical structure] [chemical structure]
wherein X represents a point of covalent attachment either directly to an amine in X1 or to an amine that is covalently conjugated directly or indirectly to X1, or to OH when X1 is OH;
i is 1, 2, 3, 4, 5, 6, or 7;
j is 1, 2, 3, 4, 5, 6, or 7;
R1a is selected from COOH, CH₃, H, and OH;
R2, R3, R4 and R5 are each independently selected from CH₃, H, OH, and COOH, and at least one of R2, R3, R4 and R5 is CH₃ or OH; and
B₁ and B₂, which may be identical or different, are each independently an aromatic boron-containing group;
wherein Formulae FF89-FF112 are: [chemical structure] [chemical structure] [chemical structure] [chemical structure] [chemical structure]
wherein X represents a point of covalent attachment either directly to an amine in X1 or to an amine that is covalently conjugated directly or indirectly to X1, or to OH when X1 is OH;
i is 1, 2, 3,4, 5,6, or 7; and
B₁, B₂ and B₃, which may be identical or different, are each independently an aromatic boron-containing group, a carboxylic acid derivative, or a H, wherein in each FF89-FF112 structure containing B1, B2 and B3 groups, at least two of the B1, B2 and B3 groups are independently an aromatic boron-containing group;
wherein Formulae FF113-FF136 are: [chemical structure] [chemical structure] [chemical structure] [chemical structure]
wherein X represents a point of covalent attachment either directly to an amine in X1 or to an amine that is covalently conjugated directly or indirectly to X1, or to OH when X1 is OH;
i is 1, 2, 3, 4, 5, 6, or 7;
j is 1, 2, 3, 4, 5, 6, or 7;
k is 1, 2, 3, 4, 5, 6, or 7;
m is 1, 2, 3, 4, 5, 6, or 7;
each R1 is independently selected from H, an alkyl group, an acyl group, a cycloalkyl group, a haloalkyl group, an aryl group, and a heteroaryl group, each R1 optionally comprises one or more alkyl-halide, halide, sulfhydryl, aldehyde, amine, acid, hydroxyl, alkyl, or aryl groups; and
B₁ and B₂, which may be identical or different, each independently represents an aromatic boron-containing group;
wherein Formulae FF137-FF160 are: [chemical structure] [chemical structure] [chemical structure] [chemical structure]
wherein X represents a point of covalent attachment either directly to an amine in X1 or to an amine that is covalently conjugated directly or indirectly to X1, or to OH when X1 is OH;
i is 1, 2, 3, 4, 5, 6, or 7;
j is 1, 2, 3, 4, 5, 6, or 7;
k is 1, 2, 3, 4, 5, 6, or 7;
m is 1, 2, 3, 4, 5, 6, or 7;
each R1 is independently selected from H, an alkyl group, an acyl group, a cycloalkyl group, a haloalkyl group, an aryl group, and a heteroaryl group, each R1 optionally comprises one or more alkyl-halide, halide, sulfhydryl, aldehyde, amine, acid, hydroxyl, alkyl, or aryl groups; and
B₁ and B₂, which may be identical or different, each independently represents an aromatic boron-containing group;
wherein Formulae FF161-FF164 are: [chemical structure]
wherein X represents a point of covalent attachment either directly to an amine in X1 or to an amine that is covalently conjugated directly or indirectly to X1, or to OH when X1 is OH;
i is 1, 2, 3, 4, or 5;
j is 1, 2, 3, 4, or 5;
each R6, R7, R8, and R9 for different values of j is independently selected from H, CF₃, CH₃, CHF₂, and (CH₂)ₘCH₃, wherein m is 1, 2, 3, 4, or 5;
Y3, Y4, Y5, Y6 and Y7 are each independently selected from H, CH₂—X4, and Formulae IV-1 to IV-135;
wherein X4 is selected from —COOH, —(CH₂)ₘCOOH, an alkyl group, an acyl group, a cycloalkyl group, a haloalkyl group, an aryl group, and a heteroaryl group, each X4 optionally comprises one or more alkyl-halide, halide, sulfhydryl, aldehyde, amine, acid, hydroxyl, alkyl or aryl groups; wherein m is 1, 2, 3, 4, or 5;
wherein at least one of Y5, Y6 and Y7 in Formulae FF162 and FF163 is not H and at least one of Y7, R8 and R9 in FF164 is not H; and
wherein Formulae IV-1 to IV-135 are: [chemical structure] [chemical structure] [chemical structure] [chemical structure] [chemical structure] [chemical structure] [chemical structure] [chemical structure] [chemical structure] [chemical structure] [chemical structure] [chemical structure] [chemical structure] [chemical structure] [chemical structure]
wherein Xa represents CH═O, CHF₂, CF₃, CH₂SH, COOH, CH₂OH, CH₂NO₂, CH₂NH₂, CH₃, C(CH₃)₃, CH(CH₃)₂, CH((CH₂)₃—CH₃)₂, or CH(CH₂—CH₃)₂;
Xb represents O, NH, CH₂, or S;
Xc represents CH or N;
each R₁₀ is independently selected from H, F, Cl, Br, CH₃, CF₃, CH═O, OH, COOH, and (CH₂)ₙCH₃,
m is 1, 2, 3, 4, or 5; and n is 1, 2, 3, 4, or 5;
B₁ and B₂, which may be identical or different, each independently represents an aromatic boron-containing group; and
* in Formulae IV-1 to IV-135 represents a point of attachment to corresponding Formulae FF161-164;
wherein Formulae FF165-FF166 are: [chemical structure]
wherein X represents a point of covalent attachment either directly to an amine in X1 or to an amine that is covalently conjugated directly or indirectly to X1, or to OH when X1 is OH;
m is 1, 2, 3, 4, 5, 6, or 7;
n is 1, 2, 3, 4, 5, 6, or 7;
X5 is S, O, or NH; and
each R₁ is independently selected from H, F, Cl, Br, OH, CH₂—NH₂, NH₂, (C═O)—NH₂, CH═O, SO₂CH₃, SO₂CF₃, CF₃, CHF₂, NO₂, CH₃, OCH₃, O(CH₂)ₘCH₃, (SO₂)NH—CH₃, (SO₂)NH(CH₂)ₘCH₃, and OCF₃, wherein m is 1, 2, 3, 4, 5, 6, or 7;
wherein Formulae FF167-FF192 are: [chemical structure] [chemical structure] [chemical structure]
wherein X represents a point of covalent attachment either directly to an amine in X1 or to an amine that is covalently conjugated directly or indirectly to X1, or to OH when X1 is OH;
B₁ and B₂, which may be identical or different, each independently represents an aromatic boron-containing group;
wherein Formulae FF193-FF209 are: [chemical structure] [chemical structure] [chemical structure]
wherein R in FF208 and FF209 is an alkyl, aryl or halide that is covalently conjugated through at least one CH₂ group to the amino group in the side chain of FF208 or FF209,
R1 and R2 are independently selected from H, CH₃, alkyl, and formulae IV-1 to IV-135;
i is 1, 2, 3, 4, or 5;
j is 1, 2, 3, 4, or 5; and
wherein X represents a point of covalent attachment either directly to an amine in X1 or to an amine that is covalently conjugated directly or indirectly to X1, or to OH when X1 is OH; and
B₁ and B₂, which may be identical or different, each independently represents an aromatic boron-containing group, and
wherein Formulae FF210-FF224 are: [chemical structure] [chemical structure]
wherein R11 in FF210 to FF212 is selected from Formulae IV-1 to IV-135 and R12 is selected from an amine, a hydroxyl, an alkyl, and a halide group;
wherein each R13 is independently selected from H, CH₃, alkyl, aryl and Formulae IV-1 to IV-135; R14 is selected from H, CH₃, alkyl, aryl and heteroaryl;
wherein X represents a point of covalent attachment either directly to an amine in X1 or to an amine that is covalently conjugated directly or indirectly to X1, or to OH when X1 is OH;
X″ represents a point of covalent attachment to an amine —N in the compound, wherein — represents a single covalent bond to a CH₂ or CH group in the compound;
i is 1, 2, 3, 4, or 5;
j is 1, 2, 3, 4, or 5; and
wherein at least one primary or secondary amine in FF1-FF223 is optionally covalently conjugated to B₆; and
B₁, B₂, B₃, B₄, B₅, and B₆ each independently represents an aromatic boron-containing group, wherein in each FF structure containing B₁, B₂ and B₃ groups, at least two of the B₁, B₂ and B₃ groups are independently an aromatic boron-containing group.

2. The compound of claim 1, wherein the compound is a molecular conjugate represented by Formula I, or a stereoisomer or a mixture of stereoisomers, or pharmaceutically acceptable salt thereof: [chemical structure]
wherein
X1 comprises:
(i) NH₂ or OH,
(ii) a polypeptide drug substance comprising an amine,
(iii) a polypeptide drug substance that is covalently conjugated to an amine containing linker, or
(iv) an amine configured to be covalently conjugated to a polypeptide drug substance;
each Z1c is independently selected from Formulae FF1-FF224 and covalently conjugated either directly, or via Z1a and/or Z1b, to X1;
each Z1a independently comprises 1 to 50 amino acids connected together using amide or peptide bonds;
each Z1b is independently a small-molecule linker;
each m′ is independently 0 or 1;
each n′ is independently 0 or a positive integer;
each o′ is independently an integer greater than or equal to 1;
each p′ is a positive integer; and
q′ is a positive integer of at least 1 and not more than two times the total number of amine groups in X1, wherein when any of n′, o′, p′, or q′ is 2 or more, the corresponding groups Z1a, Z1b, and Z1c are independently selected and may be the same or different;
wherein each Z1c is independently covalently conjugated, directly or indirectly, to an amine of Z1a, to an amine of Z1b, or to X1; and
wherein optionally the molecular conjugate may comprise one or more isotopes at any position of the molecular conjugate of Formula I.

3. The compound of claim 1, wherein the compound comprises at least one of B₁, B₂ and B₃ independently selected from Formulae F1-F12 or wherein the compound comprises at least one of B₄, B₅ and B₆ independently selected from Formulae F1-F10,
wherein Formulae F1-F10 are: [chemical structure] [chemical structure]
wherein for B₁, B₂, and B₃:
one R₁ represents (C═O)—*, S(═O)(═O)—*, (CH₂)ₘ(C═O)—*, or (CH₂)ₘ—*, wherein —* represents the attachment point to the rest of Z1c, and m is 1, 2, 3, 4, 5, 6, or 7; and
each remaining R₁ is independently selected from H, F, Cl, Br, OH, CH₂—NH₂, NH₂, (C═O)—NH₂, CH═O, SO₂CH₃, SO₂CF₃, CF₃, CHF₂, NO₂, CH₃, OCH₃, O(CH₂)ₘCH₃, (SO₂)NH—CH₃, (SO₂)NH(CH₂)ₘCH₃, and OCF₃, wherein m is 1, 2, 3,4, 5, 6, or 7;
wherein for B₄ and B₅:
one R₁ for B₄ represents (CH₂)ₘ—Ø, wherein —Ø represents an attachment point to the rest of Z1c and one R₁ for B₅ represents (C═O)—*, S(═O)(═O)—*, (CH₂)ₘ(C═O)—*, or (CH₂)ₘ—*, wherein —* represents an attachment point to the rest of Z1c, and m is 1, 2, 3, 4, 5, 6, or 7; and
each remaining R₁ is independently selected from H, F, Cl, Br, OH, CH₂—NH₂, NH₂, (C═O)—NH₂, CH═O, SO₂CH₃, SO₂CF₃, CF₃, CHF₂, NO₂, CH₃, OCH₃, O(CH₂)ₘCH₃, (SO₂)NH—CH₃, —(SO₂)NH(CH₂)ₘCH₃, and OCF₃, wherein m is 1, 2, 3,4, 5, 6, or 7;
wherein for B₆:
one R₁ for B₆ represents (CH₂)ₘ—Ø, wherein —Ø represents an attachment point to the rest of the compound, and m is 1, 2, 3, 4, 5, 6, or 7; and
each remaining R₁ is independently selected from H, F, Cl, Br, OH, CH₂—NH₂, NH₂, (C═O)—NH₂, CH═O, SO₂CH₃, SO₂CF₃, CF₃, CHF₂, NO₂, CH₃, OCH₃, O(CH₂)ₘCH₃, (SO₂)NH—CH₃, (SO₂)NH(CH₂)ₘCH₃, and OCF₃, wherein m is 1, 2, 3,4, 5, 6, or 7;
wherein,
for Formulae F3-F4:
R_{w} is O or S;
for Formulae F5-F10:
Y8 is selected from O, N, and NR, wherein R is an alkyl group or H;
Y9 is H, CH₃, or an alkyl group, provided that when Y8 is O, Y9 is a CH₃ or an alkyl group;
each Y10 is independently selected from H, CH₃, F, CF₃, and OCH₃; and
i is 1, 2, or 3; and
wherein Formulae F11-F12 are: [chemical structure]
j is 1, 2, 3, 4, 5, 6, or 7; and
— represents an attachment point to the rest of Z1c.

4. The compound of claim 2, wherein the compound comprises at least one Z1b selected from Formulae IIa-IIai and Formulae IIIa-IIIai, wherein Formulae IIa-IIai are: [chemical structure] [chemical structure] [chemical structure]
wherein:
r is, 1, 2, 3, 4, or 5;
s is 0, 1, 2, 3, 4, or 5;
W represents CH₂—˜ or (C═O)—˜, wherein —˜ is a covalent linkage to X1; and
each V₁ is independently selected from NH—†, CH₂—†, and (C═O)—† and each V₂ is N—†, wherein —† is a covalent linkage towards successive Z1b, Z1a or Z1c, provided that V₁ is NH—† when connected to Z1c; and the covalent linkages between Z1a and Z1b units each independently comprise an amine linkage or an amide linkage; and when n′=0 and m′=1, Z1a is directly conjugated to X1 by an amine linkage or amide linkage, and
wherein Formulae IIIa-IIIai are: [chemical structure] [chemical structure] [chemical structure]
wherein:
r is 1, 2, 3, 4, or 5;
s is 1, 2, 3, 4, or 5; and
each V₁ is independently selected from NH—†, CH₂—†, and (C═O)—† and each V₂ is N—†, wherein —† is a covalent linkage towards successive Z1b, Z1a or Z1c, provided that V₁ is NH—† when connected to Z1c; and the covalent linkages between Z1a and Z1b units each independently comprise an amine linkage or an amide linkage; and when n′=0 and m′=1, Z1a is directly conjugated to X1 by an amine linkage or amide linkage.

5. The compound of claim 1, wherein the at least one Z1c is covalently conjugated indirectly via a linker selected from (i) Formulae FL1-FL19: [chemical structure] [chemical structure]
wherein, in Formulae FL1 to FL19:
Z″ represents an attachment point toward X1;
R″ represents an attachment point toward Z1c;
p is 1, 2, 3, 4, or 5,
q is 1, 2, 3, 4, or 5,
r is 1, 2, 3, 4, or 5; and
any primary amine is optionally acetylated or alkylated; and
(ii) an L- or D-amino acid comprising at least one amine group directly conjugated to Z1c, wherein an acid functional group of the amino acid is conjugated toward X1 in Formula I.

6. The compound of claim 2, wherein n′ is 1 and each of the Z1b is independently selected from (i) Formulae FL1-FL19: [chemical structure] [chemical structure]
wherein, in Formulae FL1 to FL19:
Z″ represents an attachment point toward X1;
R″ represents an attachment point toward Z1c;
p is 1, 2, 3, 4, or 5,
q is 1, 2, 3, 4, or 5,
r is 1, 2, 3, 4, or 5; and
any primary amine is optionally acetylated or alkylated; and
(ii) an L- or D-amino acid comprising at least one amine group directly conjugated to Z1c, wherein an acid functional group of the amino acid is conjugated toward X1 in Formula I.

7. The compound of claim 1, wherein the compound comprises a drug substance comprising a human polypeptide hormone of the human pancreas, insulin, glucagon, GLP-1, a somatostatin, a gastric inhibitory polypeptide, a glucose-dependent insulinotropic polypeptide, a hybrid peptide comprising sequences from two or more human polypeptide hormones, or an analogue thereof.

8. The compound of claim 5, wherein:
X1 comprises human insulin or a human insulin analogue comprising an A-chain and a B-chain, wherein the A-chain comprises a sequence selected from SEQ ID NOs 1 and 3 to 33, and the B-chain comprises a sequence selected from SEQ ID NOs 2 and 34 to 74, 24047, and 24048;
each Z1c is independently selected from FF1, FF10, FF12, FF14, FF15, FF114, FF115, FF116, FF163, FF193, FF194, FF203, and FF221-FF224 and covalently conjugated either directly, or indirectly via the linker, to Z1a and/or Z1b, or to X1;
each Z1a is independently absent or independently comprises a sequence selected from K, GK, KGSH (SEQ ID NO:24049), KGSHK (SEQ ID NO:4238), KNSTK (SEQ ID NO:5085), GKASHK (SEQ ID NO:12414), GKEEEK (SEQ ID NO:12677), GKEEHK (SEQ ID NO:12680), GKGHSK (SEQ ID NO:13120), GKGSH (SEQ ID NO:24050), GKGSHK (SEQ ID NO:13198), GKGSTK (SEQ ID NO:13205), GKHENK (SEQ ID NO:13271), GKNSHK (SEQ ID NO:13982), GKNSTK (SEQ ID NO:13989), GKQSSK (SEQ ID NO:14380), GKYQFK (SEQ ID NO:15128), GKGSKK (SEQ ID NO:24045), GKKPGKK (SEQ ID NO:24046), GKGPSK (SEQ ID NO:24044), GKPSHKP (SEQ ID NO:24043), and GSHKGSHK (SEQ ID NO:24042);
each said linker is selected from FL1, FL3, FL4, and FL5;
each m′ is independently 0 or 1;
each n′ is independently 0, 1, 2, or 3;
each o′ is independently 1, 2, 3, 4, or 5;
each p′ is 1, 2, 3, 4, or 5; and
q′ is 1, 2, 3, or 4, wherein when any of n′, o′, p′, or q′ is 2 or more, the corresponding groups Z1a, Z1b, and Z1c are independently selected and may be the same or different; and
wherein each Z1c is independently covalently conjugated, directly or indirectly, to an amine of Z1a, to an amine of Z1b, or to X1.

9. (canceled)

10. The compound of claim 2, wherein each of the Z1a is independently absent or independently comprises a sequence selected from K, GK, KGSH (SEQ ID NO:24049), GKGSH (SEQ ID NO:24050), KGSHK (SEQ ID NO:4238), and GKGSHK (SEQ ID NO:13198).

11. The compound of claim 2, wherein each of the Z1c is independently selected from FF1, FF10, FF12, FF14, FF15, FF114, FF115, FF116, and FF221-FF224, and wherein the B₁ and the B₂ are independently selected from Formulae F1 and F2.

12. (canceled)

13. (canceled)

14. (canceled)

15. The compound of claim 1, wherein each of the Z1c is independently selected from FF10, FF12, FF116, FF221, FF222, and FF224.

16. The compound of claim 2, wherein:
each B₁ and B₂ is F2 and is covalently conjugated to Z1c using an amide linkage,
each Z1b is independently absent; FL3 wherein p is 1, 2, or 3; or FL5 wherein p is 2, 3, or 4;
each FF is independently selected from FF10, FF12, FF116, FF134, FF163, FF193, FF203, FF221, FF222 and FF224; wherein each FF12 and FF222 has either (S,R) or (S,S) stereochemistry;
each Z1c is conjugated either directly or indirectly through FL3 or FL5 to the amine group in one or more lysine side chain in X1 or the N-terminus in X1; and
X1 is a polypeptide drug substance and/or an insulin optionally having from 0 to 4 residues replaced, inserted, or mutated to lysines, and wherein the lysines are each conjugated directly or indirectly to a Z1c.

17. (canceled)

18. The compound of claim 2, wherein the compound is selected from:

[chemical structure]

19. (canceled)

20. (canceled)

21. The compound of claim 1, wherein Z1c is covalently conjugated directly to X1 via a linker, and wherein the linker is independently selected from gamma-glutamic acid, beta-alanine, and [chemical structure]
Formula FL3,
wherein p is 1, 2, or 3; and [chemical structure]
Formula FL5,
wherein p is 2, 3, or 4.

22. (canceled)

23. The compound of claim 1, wherein the compound is selected from:

[symbol]

24.-49. (canceled)

50. A compound selected from Formulae FF1-FF224:
wherein Formulae FF1-FF48 are: [chemical structure] [chemical structure] [chemical structure] [chemical structure] [chemical structure] [chemical structure]
wherein X is selected from an amine, OH, and halogen; and
i is 1, 2, 3, 4, 5, 6, or 7;
j is 1, 2, 3, 4, 5, 6, or 7; and
B₁ and B₂, which may be identical or different, each independently represents an aromatic boron-containing group; and
wherein Formulae FF49-FF88 are: [chemical structure] [chemical structure] [chemical structure] [chemical structure] [chemical structure]
wherein X is selected from an amine, OH, and halogen;
i is 1, 2, 3, 4, 5, 6, or 7;
j is 1, 2, 3, 4, 5, 6, or 7;
R1a is selected from COOH, CH₃, H, and OH;
R2, R3, R4 and R5 is each independently selected from CH₃, H, OH, and COOH, and at least one of R2, R3, R4 and R5 is CH₃ or OH; and
B₁ and B₂, which may be identical or different, are each independently an aromatic boron-containing group; and
wherein Formulae FF89-FF112 are: [chemical structure] [chemical structure] [chemical structure] [chemical structure] [chemical structure]
wherein X is selected from an amine, OH, and halogen;
i is 1, 2, 3, 4, 5, 6, or 7; and
B₁, B₂ and B₃, which may be identical or different, each independently represents an aromatic boron-containing group, a carboxylic acid derivative, or a H, wherein at least two of B₁, B₂ and B₃ in each FF structure are independently an aromatic boron-containing group; and
wherein Formulae FF113-FF136 are: [chemical structure] [chemical structure] [chemical structure] [chemical structure]
wherein X is selected from an amine, OH, and halogen;
i is 1, 2, 3, 4, 5, 6, or 7;
j is 1, 2, 3, 4, 5, 6, or 7;
k is 1, 2, 3, 4, 5, 6, or 7;
m is 1, 2, 3, 4, 5, 6, or 7;
each R1 is independently selected from H, an alkyl group, an acyl group, a cycloalkyl group, a haloalkyl group, an aryl group, and a heteroaryl group, each R1 optionally comprises one or more alkyl-halide, halide, sulfhydryl, aldehyde, amine, acid, hydroxyl, alkyl or aryl groups; and
B₁ and B₂, which may be identical or different, each independently represents an aromatic boron-containing group; and
wherein Formulae FF137-FF160 are: [chemical structure] [chemical structure] [chemical structure] [chemical structure]
wherein X is selected from an amine, OH, and halogen;
i is 1, 2, 3, 4, 5, 6, or 7;
j is 1, 2, 3, 4, 5, 6, or 7;
k is 1, 2, 3, 4, 5, 6, or 7;
m is 1, 2, 3, 4, 5, 6, or 7;
each R1 is independently selected from H, an alkyl group, an acyl group, a cycloalkyl group, a haloalkyl group, an aryl group, and a heteroaryl group, each R1 optionally comprises one or more alkyl-halide, halide, sulfhydryl, aldehyde, amine, acid, hydroxyl, alkyl or aryl groups; and
B₁ and B₂, which may be identical or different, each independently represents an aromatic boron-containing group; and
wherein Formulae FF161-FF164 are: [chemical structure]
wherein X is selected from an amine, OH, and halogen;
i is 1, 2, 3, 4, or 5;
j is 1, 2, 3, 4, or 5;
each R6, R7, R8, and R9 for different values of j is independently selected from H, CF₃, CH₃, CHF₂, and (CH₂)ₘCH₃, wherein m is 1, 2, 3, 4, or 5;
Y3, Y4, Y5, Y6 and Y7 are each independently selected from H, CH₂—X4, and Formulae IV-1 to IV-135;
wherein X4 is selected from —COOH, —(CH₂)ₘCOOH, an alkyl group, an acyl group, a cycloalkyl group, a haloalkyl group, an aryl group, and a heteroaryl group, each optionally comprising one or more alkyl-halide, halide, sulfhydryl, aldehyde, amine, acid, hydroxyl, alkyl or aryl groups; wherein m is 1, 2, 3, 4, or 5;
wherein at least one of Y5, Y6, and Y7 in Formulae FF162 and FF163 is not H and at least one of Y7, R8 and R9 in FF164 is not H; and
wherein Formulae IV-1 to IV-135 are: [chemical structure] [chemical structure] [chemical structure] [chemical structure] [chemical structure] [chemical structure] [chemical structure] [chemical structure] [chemical structure] [chemical structure] [chemical structure] [chemical structure] [chemical structure] [chemical structure] [chemical structure]
wherein:
Xa represents CH═O, CHF₂, CF₃, CH₂SH, COOH, CH₂OH, CH₂NO₂, CH₂NH₂, CH₃, C(CH₃)₃, CH(CH₃)₂, CH((CH₂)₃CH₃)₂, or CH(CH₂CH₃)₂;
Xb represents O, NH, CH₂, or S;
Xc represents CH or N;
each R₁₀ is independently selected from H, F, Cl, Br, CH₃, CF₃, CH═O, OH, COOH, and (CH₂)ₙCH₃,
m is 1, 2, 3, 4, or 5; and n is 1, 2, 3, 4, or 5;
B₁ and B₂, which may be identical or different, each independently represents an aromatic boron-containing group; and
* in Formulae IV-1 to IV-135 represents the point of attachment to corresponding Formulae FF161-164; and
wherein Formulae FF165-FF166 are: [chemical structure]
wherein X is selected from an amine, OH, and halogen;
m is 1, 2, 3, 4, 5, 6, or 7;
n is 1, 2, 3, 4, 5, 6, or 7;
X5 is S, O, or NH; and
each R₁ is independently selected from H, F, Cl, Br, OH, CH₂—NH₂, NH₂, (C═O)—NH₂, CH═O, SO₂CH₃, SO₂CF₃, CF₃, CHF₂, NO₂, CH₃, OCH₃, O(CH₂)ₘCH₃, (SO₂)NH CH₃, (SO₂)NH(CH₂)ₘCH₃, and OCF₃, wherein m is 1, 2, 3, 4, 5, 6, or 7; and
wherein Formulae FF167-FF192 are: [chemical structure] [chemical structure] [chemical structure]
wherein X is selected from an amine, OH, and halogen;
B₁ and B₂, which may be identical or different, each independently represents an aromatic boron-containing group, and
wherein Formulae FF193-FF209 are: [chemical structure] [chemical structure] [chemical structure]
wherein R in FF208 and FF209 is an alkyl, aryl or halide that is covalently conjugated through at least one CH₂ group to the amino group in the side chain of FF208 or FF209;
R1 and R2 are independently selected from H, CH₃, alkyl, and formulae IV-1 to IV-135;
i is 1, 2, 3, 4, or 5;
j is 1, 2, 3, 4, or 5; and
wherein X is selected from an amine, OH, and halogen; and
B₁ and B₂, which may be identical or different, each independently represents an aromatic boron-containing group; and
wherein Formulae FF210-FF224 are: [chemical structure] [chemical structure]
wherein R11 in FF210 to FF212 is independently selected from Formulae IV-1 to IV-135 and R12 is selected from an amine, a hydroxyl, an alkyl, and a halide group;
wherein each R13 is independently selected from H, CH₃, alkyl, aryl, and formulae IV-1 to IV-135; R14 is selected from H, CH₃, alkyl, aryl, and heteroaryl;
wherein X is independently selected from an amine, OH, and halogen;
X″ is an amine;
i is 1, 2, 3, 4, or 5;
j is 1, 2, 3, 4, or 5; and
wherein at least one primary or secondary amine in FF1-FF223 is optionally covalently conjugated to B₆; and
B₁, B₂, B₃, B₄, B₅ and B₆ each independently represents an aromatic boron-containing group, wherein in each FF structure containing B₁, B₂ and B₃ groups, at least two of the B₁, B₂ and B₃ groups are independently an aromatic boron-containing group; and
when X is an amine in any one of Formulae FF1 to FF223, X is optionally acetylated or alkylated.

51. The compound of claim 50, wherein the compound comprises at least one of B₁, B₂ and B₃ independently selected from Formulae F1-F12 or wherein the compound comprises at least one of B₄, B₅ and B₆ independently selected from Formulae F1-F10,
wherein Formulae F1-F10 are: [chemical structure] [chemical structure]
wherein for B₁, B₂, B₃:
one R₁ represents (C═O)—*, S(═O)(═O)—*, (CH₂)ₘ(C═O)—*, or (CH₂)ₘ—*, wherein —* represents an attachment point to the rest of Z1c, and m is 1, 2, 3, 4, 5, 6, or 7;
each remaining R₁ is independently selected from H, F, Cl, Br, OH, CH₂—NH₂, NH₂, (C═O)—NH₂, CH═O, SO₂CH₃, SO₂CF₃, CF₃, CHF₂, NO₂, CH₃, OCH₃, O(CH₂)ₘCH₃, —(SO₂)NH CH₃, —(SO₂)NH(CH₂)ₘCH₃, and OCF₃, wherein m is 1, 2, 3,4, 5, 6, or 7;
wherein for B₄, B₅:
one R₁ for B₄ represents (CH₂)ₘ—Ø, wherein —Ø represents the attachment point (representing a covalent bond) to an amine in X1 and one R₁ for B₅ represents (C═O)—*, S(═O)(═O)—*, (CH₂)ₘ(C═O)—*, or (CH₂)ₘ—*, wherein —* represents the attachment point to the same amine in X1, and m is 1, 2, 3, 4, 5, 6, or 7;
each remaining R₁ is independently selected from H, F, Cl, Br, OH, CH₂—NH₂, NH₂, (C═O)—NH₂, CH═O, SO₂CH₃, SO₂CF₃, CF₃, CHF₂, NO₂, CH₃, OCH₃, O(CH₂)ₘCH₃, —(SO₂)NH CH₃, —(SO₂)NH(CH₂)ₘCH₃, and OCF₃, wherein m is 1, 2, 3,4, 5, 6, or 7;
wherein for B₆:
one R₁ for B₆ represents (CH₂)ₘ—Ø, wherein —Ø represents the attachment point (representing a covalent bond) to the rest of the compound, and m is 1, 2, 3, 4, 5, 6, or 7;
each remaining R₁ is independently selected from H, F, Cl, Br, OH, CH₂—NH₂, NH₂, (C═O)—NH₂, CH═O, SO₂CH₃, SO₂CF₃, CF₃, CHF₂, NO₂, CH₃, OCH₃, O(CH₂)ₘCH₃, —(SO₂)NH CH₃, —(SO₂)NH(CH₂)ₘCH₃, and OCF₃, wherein m is 1, 2, 3,4, 5, 6, or 7;
for Formulae F3-F4:
R_{w} is 0 or S;
for Formulae F5-F10:
Y8 is selected from O, N, and NR, wherein R is an alkyl group or H;
Y9 is H, CH₃, or an alkyl group, provided that when Y8 is O, Y9 is a CH₃ or higher alkyl group;
each Y10 is independently selected from H, CH₃, F, CF₃, and OCH₃; and
i is 1, 2, or 3; and
wherein Formulae F11-F12 are: [chemical structure]
j is 1, 2, 3, 4, 5, 6, or 7; and
— represents the attachment point to the rest of Z1c.

52. The compound of claim 50, wherein the compound is selected from:
N-(3-(3-borono-5-nitrobenzamido)propyl)-N-(3-borono-5-nitrobenzoyl)glycine (DS01);
N-(4-((4-(3-borono-5-nitrobenzamido)cyclohexyl)methyl)cyclohexyl)-N-(3-borono-5-nitrobenzoyl)glycine (DS02);
N-(4-((3-borono-5-nitrobenzamido)methyl)benzyl)-N-(3-borono-5-nitrobenzoyl)glycine (DS03);
N-(3-((3-borono-5-nitrobenzamido)methyl)benzyl)-N-(3-borono-5-nitrobenzoyl)glycine (DS04);
N-(4-(3-borono-5-nitrobenzamido)butyl)-N-(3-borono-5-nitrobenzoyl)glycine (DS05);
N-(3-(3-borono-5-fluorobenzamido)propyl)-N-(3-borono-5-fluorobenzoyl)glycine (DS06);
N-(3-(3-borono-5-fluorobenzamido)-2,2-dimethylpropyl)-N-(3-borono-5-fluorobenzoyl)glycine (DS07);
bis(3-(3-borono-5-fluorobenzamido)propyl)glycine (DS08);
N-(4-((3-borono-5-fluorobenzamido)methyl)benzyl)-N-(3-borono-5-fluorobenzoyl)glycine (DS09);
N-(3-((3-borono-5-fluorobenzamido)methyl)benzyl)-N-(3-borono-5-fluorobenzoyl)glycine (DS10);
N-(2-(3-borono-5-fluorobenzamido)cyclohexyl)-N-(3-borono-5-fluorobenzoyl)glycine (DS11);
N-(3-(3-borono-4-fluorobenzamido)propyl)-N-(3-borono-4-fluorobenzoyl)glycine (DS12);
N-(4-((4-(3-borono-4-fluorobenzamido)cyclohexyl)methyl)cyclohexyl)-N-(3-borono-4-fluorobenzoyl)glycine (DS13);
N-(3-(3-borono-4-fluorobenzamido)-2,2-dimethylpropyl)-N-(3-borono-4-fluorobenzoyl)glycine (DS14);
N-(4-((3-borono-4-fluorobenzamido)methyl)benzyl)-N-(3-borono-4-fluorobenzoyl)glycine (DS15);
N-(3-((3-borono-4-fluorobenzamido)methyl)benzyl)-N-(3-borono-4-fluorobenzoyl)glycine (DS16);
N-((1S,2R)-2-(3-borono-4-fluorobenzamido)cyclohexyl)-N-(3-borono-4-fluorobenzoyl)glycine (DS17);
N-((1S,2S)-2-(3-borono-4-fluorobenzamido)cyclohexyl)-N-(3-borono-4-fluorobenzoyl)glycine (DS18);
N-(3-(3-borono-5-bromobenzamido)propyl)-N-(3-borono-5-bromobenzoyl)glycine (DS19);
N-(4-((4-(3-borono-5-bromobenzamido)cyclohexyl)methyl)cyclohexyl)-N-(3-borono-5-bromobenzoyl)glycine (DS20);
bis(3-(3-borono-5-bromobenzamido)propyl)glycine (DS21);
N-(4-((3-borono-5-bromobenzamido)methyl)benzyl)-N-(3-borono-5-bromobenzoyl)glycine (DS22);
N-(3-((3-borono-5-bromobenzamido)methyl)benzyl)-N-(3-borono-5-bromobenzoyl)glycine (DS23);
N-(2-(3-borono-5-bromobenzamido)cyclohexyl)-N-(3-borono-5-bromobenzoyl)glycine (DS24);
N-(3-(4-borono-3-fluorobenzamido)propyl)-N-(4-borono-3-fluorobenzoyl)glycine (DS25);
N-(4-((4-(4-borono-3-fluorobenzamido)cyclohexyl)methyl)cyclohexyl)-N-(4-borono-3-fluorobenzoyl)glycine (DS26);
N-(3-(4-borono-3-fluorobenzamido)-2,2-dimethylpropyl)-N-(4-borono-3-fluorobenzoyl)glycine (DS27);
bis(3-(4-borono-3-fluorobenzamido)propyl)glycine (DS28);
N-(4-((4-borono-3-fluorobenzamido)methyl)benzyl)-N-(4-borono-3-fluorobenzoyl)glycine (DS29);
N-(3-((4-borono-3-fluorobenzamido)methyl)benzyl)-N-(4-borono-3-fluorobenzoyl)glycine (DS30);
N-((1S,2R)-2-(4-borono-3-fluorobenzamido)cyclohexyl)-N-(4-borono-3-fluorobenzoyl)glycine (DS31);
N-(1-hydroxy-1,3-dihydrobenzo[c][1,2]oxaborole-6-carbonyl)-N-(3-(1-hydroxy-1,3-dihydrobenzo[c][1,2]oxaborole-6-carboxamido)propyl)glycine (DS32);
N-(1-hydroxy-1,3-dihydrobenzo[c][1,2]oxaborole-6-carbonyl)-N-(5-(1-hydroxy-1,3-dihydrobenzo[c][1,2]oxaborole-6-carboxamido)pentyl)glycine (DS33);
N-(1-hydroxy-1,3-dihydrobenzo[c][1,2]oxaborole-6-carbonyl)-N-(3-(1-hydroxy-1,3-dihydrobenzo[c][1,2]oxaborole-6-carboxamido)-2,2-dimethylpropyl)glycine (DS34);
bis(3-(1-hydroxy-1,3-dihydrobenzo[c][1,2]oxaborole-6-carboxamido)propyl)glycine (DS35);
N-(1-hydroxy-1,3-dihydrobenzo[c][1,2]oxaborole-6-carbonyl)-N-(3-((1-hydroxy-1,3-dihydrobenzo[c][1,2]oxaborole-6-carboxamido)methyl)benzyl)glycine (DS36);
N-(1-hydroxy-1,3-dihydrobenzo[c][1,2]oxaborole-6-carbonyl)-N-((1S,2R)-2-(1-hydroxy-1,3-dihydrobenzo[c][1,2]oxaborole-6-carboxamido)cyclohexyl)glycine (DS37);
N-(1-hydroxy-1,3-dihydrobenzo[c][1,2]oxaborole-6-carbonyl)-N-(4-(1-hydroxy-1,3-dihydrobenzo[c][1,2]oxaborole-6-carboxamido)butyl)glycine (DS38);
N-(1-hydroxy-1,3-dihydrobenzo[c][1,2]oxaborole-6-carbonyl)-N-((1S,2S)-2-(1-hydroxy-1,3-dihydrobenzo[c][1,2]oxaborole-6-carboxamido)cyclohexyl)glycine (DS39);
(R)—N-(1-hydroxy-1,3-dihydrobenzo[c][1,2]oxaborole-6-carbonyl)-N-(2-(1-hydroxy-1,3-dihydrobenzo[c][1,2]oxaborole-6-carboxamido)propyl)glycine (DS40);
(S)—N-(1-hydroxy-1,3-dihydrobenzo[c][1,2]oxaborole-6-carbonyl)-N-(2-(1-hydroxy-1,3-dihydrobenzo[c][1,2]oxaborole-6-carboxamido)propyl)glycine (DS41);
N-(1-hydroxy-1,3-dihydrobenzo[c][1,2]oxaborole-6-carbonyl)-N-(2-(1-hydroxy-1,3-dihydrobenzo[c][1,2]oxaborole-6-carboxamido)cyclohexyl)glycine (DS42);
N-(3-(4-borono-3, 5-difluorobenzamido)propyl)-N-(4-borono-3, 5-difluorobenzoyl)glycine (DS43);
N-(3-(4-borono-2-fluorobenzamido)propyl)-N-(4-borono-2-fluorobenzoyl)glycine (DS44);
N-(2-(N-ethyl-1-hydroxy-1,3-dihydrobenzo[c][1,2]oxaborole-6-carboxamido)ethyl)-N-(1-hydroxy-1,3-dihydrobenzo[c][1,2]oxaborole-6-carbonyl)glycine (DS45);
N-(1-hydroxy-1,3-dihydrobenzo[c][1,2]oxaborole-6-carbonyl)-N-(2-(1-hydroxy-N-(2-hydroxyethyl)-1,3-dihydrobenzo[c][1,2]oxaborole-6-carboxamido)ethyl)glycine (DS46);
N-(1-hydroxy-1,3-dihydrobenzo[c][1,2]oxaborole-6-carbonyl)-N-(5-(1-hydroxy-1,3-dihydrobenzo[c][1,2]oxaborole-6-carboxamido)hexyl)glycine (DS47);
N-(1-hydroxy-1,3-dihydrobenzo[c][1,2]oxaborole-6-carbonyl)-N-(4-((4-(1-hydroxy-1,3-dihydrobenzo[c][1,2]oxaborole-6-carboxamido)cyclohexyl)methyl)cyclohexyl)glycine (DS48);
((2S,4S)-1-(1-hydroxy-1,3-dihydrobenzo[c][1,2]oxaborole-6-carbonyl)-4-(1-hydroxy-1,3-dihydrobenzo[c][1,2]oxaborole-6-carboxamido)pyrrolidine-2-carbonyl)glycine (DS49);
((2S,4S)-4-(3-borono-4-fluorobenzamido)-1-(3-borono-4-fluorobenzoyl)pyrrolidine-2-carbonyl)glycine (DS50);
((2S,4S)-4-(3-borono-5-nitrobenzamido)-1-(3-borono-5-nitrobenzoyl)pyrrolidine-2-carbonyl)glycine (DS51);
((2S,4S)-4-(5-borono-2-fluorobenzamido)-1-(5-borono-2-fluorobenzoyl)pyrrolidine-2-carbonyl)glycine (DS52);
(S)-(1,4-bis(1-hydroxy-1,3-dihydrobenzo[c][1,2]oxaborole-6-carbonyl)piperazine-2-carbonyl)glycine (DS53);
(S)—N-(3-amino-2-(1-hydroxy-1,3-dihydrobenzo[c][1,2]oxaborole-6-carboxamido)-3-oxopropyl)-N-benzyl-1-hydroxy-1,3-dihydrobenzo[c][1,2]oxaborole-6-carboxamide (DS54);
(S)—N-(3-amino-2-(1-hydroxy-1,3-dihydrobenzo[c][1,2]oxaborole-6-carboxamido)-3-oxopropyl)-1-hydroxy-N-(4-(trifluoromethyl)benzyl)-1,3-dihydrobenzo[c][1,2]oxaborole-6-carboxamide (DS55);
(S)—N-(3-amino-2-(1-hydroxy-1,3-dihydrobenzo[c][1,2]oxaborole-6-carboxamido)-3-oxopropyl)-N-ethyl-1-hydroxy-1,3-dihydrobenzo[c][1,2]oxaborole-6-carboxamide (DS56);
(S)—N-(3-amino-2-(1-hydroxy-1,3-dihydrobenzo[c][1,2]oxaborole-6-carboxamido)-3-oxopropyl)-1-hydroxy-N-propyl-1,3-dihydrobenzo[c][1,2]oxaborole-6-carboxamide (DS57);
(S)—N-(3-amino-2-(1-hydroxy-1,3-dihydrobenzo[c][1,2]oxaborole-6-carboxamido)-3-oxopropyl)-1-hydroxy-N-isobutyl-1,3-dihydrobenzo[c][1,2]oxaborole-6-carboxamide (DS58);
(S)—N-(3-amino-2-(1-hydroxy-1,3-dihydrobenzo[c][1,2]oxaborole-6-carboxamido)-3-oxopropyl)-1-hydroxy-N-((5-(thiophen-2-yl)pyridin-2-yl)methyl)-1,3-dihydrobenzo[c][1,2]oxaborole-6-carboxamide (DS59);
(S)—N-(3-amino-2-(1-hydroxy-1,3-dihydrobenzo[c][1,2]oxaborole-6-carboxamido)-3-oxopropyl)-1-hydroxy-N-isopentyl-1,3-dihydrobenzo[c][1,2]oxaborole-6-carboxamide (DS60);
(S)—N-(3-amino-2-(1-hydroxy-1,3-dihydrobenzo[c][1,2]oxaborole-6-carboxamido)-3-oxopropyl)-1-hydroxy-N-(quinolin-5-ylmethyl)-1,3-dihydrobenzo[c][1,2]oxaborole-6-carboxamide (DS61);
(S)—N-(3-amino-2-(1-hydroxy-1,3-dihydrobenzo[c][1,2]oxaborole-6-carboxamido)-3-oxopropyl)-1-hydroxy-N-(2-(trifluoromethoxy)benzyl)-1,3-dihydrobenzo[c][1,2]oxaborole-6-carboxamide (DS62);
(S)—N-(3-amino-2-(1-hydroxy-1,3-dihydrobenzo[c][1,2]oxaborole-6-carboxamido)-3-oxopropyl)-1-hydroxy-N-(4-(methylsulfonyl)benzyl)-1,3-dihydrobenzo[c][1,2]oxaborole-6-carboxamide (DS63);
(3-((2S,4S)-4-(5-borono-2-(methylsulfonyl)benzamido)-2-carbamoylpyrrolidine-1-carbonyl)-4-(methylsulfonyl)phenyl)boronic acid (DS64);
(4-(((3S,5S)-1-(4-borono-2,6-difluorobenzoyl)-5-carbamoylpyrrolidin-3-yl)carbamoyl)-3, 5-difluorophenyl)boronic acid (DS65);
(R,E)-4,5-bis(1-hydroxy-1,3-dihydrobenzo[c][1,2]oxaborole-6-carboxamido)pent-2-enoic acid (DS66);
(2S,4S)-1-(1-hydroxy-4-(trifluoromethyl)-1,3-dihydrobenzo[c][1,2]oxaborole-6-carbonyl)-4-(1-hydroxy-4-(trifluoromethyl)-1,3-dihydrobenzo[c][1,2]oxaborole-6-carboxamido)pyrrolidine-2-carboxamide (DS67);
N,N′-((2S,3S)-1-amino-1-oxobutane-2,3-diyl)bis(1-hydroxy-1,3-dihydrobenzo[c][1,2]oxaborole-6-carboxamide) (DS68);
(R)-3,4-bis(1-hydroxy-1,3-dihydrobenzo[c][1,2]oxaborole-6-carboxamido)butanoic acid (DS69);
3-((2S,4S)-1-(1-hydroxy-1,3-dihydrobenzo[c][1,2]oxaborole-6-carbonyl)-4-(1-hydroxy-1,3-dihydrobenzo[c][1,2]oxaborole-6-carboxamido)pyrrolidine-2-carboxamido)propanoic acid (DS70);
(S)-3-(1-hydroxy-1,3-dihydrobenzo[c][1,2]oxaborole-5-carboxamido)-4-(1-hydroxy-1,3-dihydrobenzo[c][1,2]oxaborole-6-carboxamido)butanoic acid (DS71);
(R)-4-(1-hydroxy-1,3-dihydrobenzo[c][1,2]oxaborole-5-carboxamido)-5-(1-hydroxy-1,3-dihydrobenzo[c][1,2]oxaborole-6-carboxamido)pentanoic acid (DS72);
(2S,4R)-1-(1-hydroxy-1,3-dihydrobenzo[c][1,2]oxaborole-6-carbonyl)-4-(1-hydroxy-1,3-dihydrobenzo[c][1,2]oxaborole-6-carboxamido)pyrrolidine-2-carboxylic acid (DS73);
(2S,4R)-1-(1-hydroxy-4-(trifluoromethyl)-1,3-dihydrobenzo[c][1,2]oxaborole-6-carbonyl)-4-(1-hydroxy-4-(trifluoromethyl)-1,3-dihydrobenzo[c][1,2]oxaborole-6-carboxamido)pyrrolidine-2-carboxylic acid (DS74);
(2S,3S)-3-(1-hydroxy-4-(trifluoromethyl)-1,3-dihydrobenzo[c][1,2]oxaborole-6-carboxamido)-2-(1-hydroxy-7-(trifluoromethyl)-1,3-dihydrobenzo[c][1,2]oxaborole-5-carboxamido)butanoic acid (DS75);
(R)-5-(1-hydroxy-4-(trifluoromethyl)-1,3-dihydrobenzo[c][1,2]oxaborole-6-carboxamido)-4-(1-hydroxy-7-(trifluoromethyl)-1,3-dihydrobenzo[c][1,2]oxaborole-5-carboxamido)pentanoic acid (DS76);
((2S,4S)-1-(5-borono-2-nitrobenzoyl)-4-(1-hydroxy-1,3-dihydrobenzo[c][1,2]oxaborole-6-carboxamido)pyrrolidine-2-carbonyl)glycine (DS77);
((2S,4S)-1-(5-borono-2-(methylsulfonyl)benzoyl)-4-(1-hydroxy-1,3-dihydrobenzo[c][1,2]oxaborole-6-carboxamido)pyrrolidine-2-carbonyl)glycine (DS78);
((2S,4S)-1-(3-borono-2,6-difluorobenzoyl)-4-(1-hydroxy-1,3-dihydrobenzo[c][1,2]oxaborole-6-carboxamido)pyrrolidine-2-carbonyl)glycine (DS79);
(S)-(3-((3-borono-4-fluorobenzyl)(5,6-diamino-6-oxohexyl)carbamoyl)-5-nitrophenyl)boronic acid (DS80);
(S)-(3-((4-borono-3, 5-difluorobenzyl)(5,6-diamino-6-oxohexyl)carbamoyl)-5-nitrophenyl)boronic acid (DS81);
(S)-(3-((3-boronobenzyl)(5,6-diamino-6-oxohexyl)carbamoyl)-5-nitrophenyl)boronic acid (DS82);
(S)-(3-((4-borono-2-methoxybenzyl)(5,6-diamino-6-oxohexyl)carbamoyl)-5-nitrophenyl)boronic acid (DS83);
(S)-(3-((4-borono-2-(trifluoromethyl)benzyl)(5,6-diamino-6-oxohexyl)carbamoyl)-5-nitrophenyl)boronic acid (DS84);
(S)-(5-((3-borono-N-(5,6-diamino-6-oxohexyl)-4-fluorobenzamido)methyl)-2-fluorophenyl)boronic acid (DS85);
(S)-(5-((4-borono-3, 5-difluorobenzyl)(5,6-diamino-6-oxohexyl)carbamoyl)-2-fluorophenyl)boronic acid (DS86);
(S)-(3-((3-borono-N-(5,6-diamino-6-oxohexyl)-4-fluorobenzamido)methyl) phenyl)boronic acid (DS87);
(S)-(5-((4-borono-2-methoxybenzyl)(5,6-diamino-6-oxohexyl)carbamoyl)-2-fluorophenyl)boronic acid (DS88);
(S)-(5-((4-borono-3-(trifluoromethyl)benzyl)(5,6-diamino-6-oxohexyl)carbamoyl)-2-fluorophenyl)boronic acid (DS89);
(S)-(4-((3-borono-4-fluorobenzyl)(5,6-diamino-6-oxohexyl)carbamoyl)-2-fluorophenyl)boronic acid (DS90);
(S)-(4-((4-borono-3, 5-difluorobenzyl)(5, 6-diamino-6-oxohexyl)carbamoyl)-2-fluorophenyl)boronic acid (DS91);
(S)-(4-((3-boronobenzyl)(5,6-diamino-6-oxohexyl)carbamoyl)-2-fluorophenyl)boronic acid (DS92);
(S)-(4-((4-borono-2-methoxybenzyl)(5,6-diamino-6-oxohexyl)carbamoyl)-2-fluorophenyl)boronic acid (DS93);
(S)-(4-((4-borono-2-(trifluoromethyl)benzyl)(5,6-diamino-6-oxohexyl)carbamoyl)-2-fluorophenyl)boronic acid (DS94);
(S)-(5-((3-borono-5-bromo-N-(5,6-diamino-6-oxohexyl)benzamido)methyl)-2-fluorophenyl)boronic acid (DS95);
(S)-(3-((4-borono-3, 5-difluorobenzyl)(5,6-diamino-6-oxohexyl)carbamoyl)-5-bromophenyl)boronic acid (DS96);
(S)-(3-((3-borono-5-bromo-N-(5,6-diamino-6-oxohexyl)benzamido)methyl) phenyl)boronic acid (DS97);
(S)-(3-((3-borono-5-bromo-N-(5,6-diamino-6-oxohexyl)benzamido)methyl)-5-methoxyphenyl)boronic acid (DS98);
(S)-(3-((4-borono-2-(trifluoromethyl)benzyl)(5,6-diamino-6-oxohexyl)carbamoyl)-5-bromophenyl)boronic acid (DS99);
(S)-(3-((3-borono-4-fluorobenzyl)(5,6-diamino-6-oxohexyl)carbamoyl)-5-fluorophenyl)boronic acid (DS100);
(S)-(3-((4-borono-3-methoxybenzyl)(5,6-diamino-6-oxohexyl)carbamoyl)-5-fluorophenyl)boronic acid (DS101);
(S)-(3-((4-borono-2-(trifluoromethyl)benzyl)(5,6-diamino-6-oxohexyl)carbamoyl)-5-fluorophenyl)boronic acid (DS102);
(S)-(4-((N-(5,6-diamino-6-oxohexyl)-1-hydroxy-1,3-dihydrobenzo[c][1,2]oxaborole-6-carboxamido)methyl)-2-fluorophenyl)boronic acid (DS103);
(S)-(4-((N-(5,6-diamino-6-oxohexyl)-1-hydroxy-1,3-dihydrobenzo[c][1,2]oxaborole-6-carboxamido)methyl)-2,6-difluorophenyl)boronic acid (DS104);
(S)-(3-((N-(5,6-diamino-6-oxohexyl)-1-hydroxy-1,3-dihydrobenzo[c][1,2]oxaborole-6-carboxamido)methyl)phenyl)boronic acid (DS105);
(S)-(4-((N-(5,6-diamino-6-oxohexyl)-1-hydroxy-1,3-dihydrobenzo[c][1,2]oxaborole-6-carboxamido)methyl)-3-methoxyphenyl)boronic acid (DS106);
(S)—N-(5,6-diamino-6-oxohexyl)-1-hydroxy-N-((1-hydroxy-1,3-dihydrobenzo[c][1,2]oxaborol-6-yl)methyl)-1,3-dihydrobenzo[c][1,2]oxaborole-6-carboxamide (DS107);
(S)—N-(4-amino-3-(1-hydroxy-1,3-dihydrobenzo[c][1,2]oxaborole-6-carboxamido)-4-oxobutyl)-1-hydroxy-N-((1-hydroxy-1,3-dihydrobenzo[c][1,2]oxaborol-6-yl)methyl)-1,3-dihydrobenzo[c][1,2]oxaborole-6-carboxamide (DS108);
(S)—N-(6-amino-5-(1-hydroxy-1,3-dihydrobenzo[c][1,2]oxaborole-6-carboxamido)-6-oxohexyl)-1-hydroxy-N-((1-hydroxy-1,3-dihydrobenzo[c][1,2]oxaborol-6-yl)methyl)-1,3-dihydrobenzo[c][1,2]oxaborole-6-carboxamide (DS109);
(2S,4S)-1-(1-hydroxy-1,3-dihydrobenzo[c][1,2]oxaborole-6-carbonyl)-4-(1-hydroxy-1,3-dihydrobenzo[c][1,2]oxaborole-6-carboxamido)pyrrolidine-2-carboxylic acid (DS110);
(2S,3S)-2-(1-hydroxy-1,3-dihydrobenzo[c][1,2]oxaborole-5-carboxamido)-3-(1-hydroxy-1,3-dihydrobenzo[c][1,2]oxaborole-6-carboxamido)butanoic acid (DS111); and
(2S,4R)-1-(1-hydroxy-1,3-dihydrobenzo[c][1,2]oxaborole-6-carbonyl)-4-(1-hydroxy-1,3-dihydrobenzo[c][1,2]oxaborole-6-carboxamido)pyrrolidine-2-carboxylic acid (DS112).

53. (canceled)

54. A human insulin analog, comprising an A-chain and a B-chain,
wherein the sequence of the A-chain comprises:
X_{aa′}X_{bb′}X_{cc′}X_{dd′}X_{ee′}X_{ff′}X_{gg′}VEQCCX_{hh′}X_{ii′}ICSLYQLENYCNX_{jj′}X_{kk′}X_{ll′}X_{mm′}X_{nn′}X_{oo′}X_{pp′} (SEQ ID NO:24015); and
wherein the sequence of the B-chain comprises:
(i)
(SEQ ID NO: 24016)
XₐₐX_{bb}X_{cc}X_{dd}KXₑₑX_{ff}X_{gg}XₕₕXᵢᵢXⱼⱼKXₖₖXₗₗXₘₘXₙₙQHLCGS
HLVEALYLVCXₒₒXₚₚX_{qq}GFFYTXᵣᵣTXₛₛXₜₜXᵤᵤXᵥᵥX_{ww},
wherein X_{aa′}, X_{bb′}, X_{cc′}, X_{dd′}, X_{ee′}, X_{ff′}, X_{gg′}, X_{hh′}, X_{ii′}, X_{jj′}, X_{kk′}, X_{ll′}, X_{mm′}, X_{nn′}, X_{oo′}, X_{pp′}, Xₐₐ, X_{bb}, X_{cc}, X_{dd}, Xₑₑ, X_{ff}, X_{gg}, Xₕₕ, Xᵢᵢ, Xⱼⱼ, Xₖₖ, Xₗₗ, Xₘₘ, Xₙₙ, Xₒₒ, Xₚₚ, X_{qq}, Xᵣᵣ, Xₛₛ, Xₜₜ, Xᵤᵤ, Xᵥᵥ, and X_{ww} are each independently either absent or selected from amino acid residues A, D, E, F, G, H, I, K, L, N, P, Q, R, S, T, V, Y and W,
(ii)
(SEQ ID NO: 24017)
XₐₐX_{bb}X_{cc}X_{dd}KPXₑₑX_{ff}X_{gg}XₕₕXᵢᵢXⱼⱼXₖₖXₗₗXₘₘXₙₙQHLCGS
HLVEALYLVCXₒₒXₚₚX_{qq}GFFYTXᵣᵣXₛₛXₜₜXᵤᵤXᵥᵥX_{ww},
wherein X_{aa′}, X_{bb′}, X_{cc′}, X_{dd′}, X_{ee′}, X_{ff′}, X_{gg′}, X_{hh′}, X_{ii′}, X_{jj′}, X_{kk′}, X_{ll′}, X_{mm′}, X_{nn′}, X_{oo′}, X_{pp′}, Xₐₐ, X_{bb}, X_{cc}, X_{dd}, X_{ff}, X_{gg}, Xₕₕ, Xᵢᵢ, Xⱼⱼ, Xₖₖ, Xₗₗ, Xₘₘ, Xₙₙ, Xₒₒ, Xₚₚ, X_{qq}, Xᵣᵣ, Xₛₛ, Xₜₜ, Xᵤᵤ, Xᵥᵥ, and X_{ww} are each independently either absent or selected from amino acid residues A, D, E, F, G, H, I, K, L, N, P, Q, R, S, T, V, Y and W, and wherein Xₑₑ is selected from amino acid residues A, E, F, H, I, K, L, N, P, Q, R, S, T, V, Y and W,
(iii)
(SEQ ID NO: 24018)
XₐₐX_{bb}X_{cc}X_{dd}KXₑₑX_{ff}X_{gg}XₕₕXᵢᵢXⱼⱼKXₖₖXₗₗXₘₘXₙₙQHLCGS
HLVEALYLVCXₒₒXₚₚX_{qq}GFFYTXᵣᵣXₛₛXₜₜXᵤᵤXᵥᵥX_{ww},
wherein X_{aa′}, X_{bb′}, X_{cc′}, X_{dd′}, X_{ee′}, X_{ff′}, X_{gg′}, X_{hh′}, X_{ii′}, X_{jj′}, X_{kk′}, X_{ll′}, X_{mm′}, X_{nn′}, X_{oo′}, X_{pp′}, Xₐₐ, X_{bb}, X_{cc}, X_{dd}, Xₑₑ, X_{ff}, X_{gg}, Xₕₕ, Xᵢᵢ, Xⱼⱼ, Xₖₖ, Xₗₗ, Xₘₘ, Xₙₙ, Xₒₒ, Xₚₚ, X_{qq}, Xᵣᵣ, Xₛₛ, Xₜₜ, Xᵤᵤ, Xᵥᵥ, and X_{ww} are each independently either absent or selected from amino acid residues A, D, E, F, G, H, I, K, L, N, P, Q, R, S, T, V, Y, W and at least one of Xₑₑ, X_{ff}, X_{gg}, Xₕₕ, Xᵢᵢ, Xⱼⱼ is present and at least one of Xₑₑ, X_{ff}, X_{gg}, Xₕₕ, Xᵢᵢ, Xⱼⱼ is G,
(iv)
(SEQ ID NO: 24019)
XₐₐX_{bb}X_{cc}X_{dd}KXₑₑX_{ff}X_{gg}XₕₕXᵢᵢXⱼⱼKXₖₖXₗₗXₘₘXₙₙQHLCGS
HLVEALYLVCXₒₒXₚₚX_{qq}GFFYTXᵣᵣXₛₛXₜₜXᵤᵤXᵥᵥXX_{ww},
wherein X_{aa′}, X_{bb′}, X_{cc′}, X_{dd′}, X_{ee′}, X_{ff′}, X_{gg′}, X_{hh′}, X_{ii′}, X_{jj′}, X_{kk′}, X_{ll′}, X_{mm′}, X_{nn′}, X_{oo′}, X_{pp′}, Xₐₐ, X_{bb}, X_{cc}, X_{dd}, Xₑₑ, X_{ff}, X_{gg}, Xₕₕ, Xᵢᵢ, Xⱼⱼ, Xₖₖ, Xₗₗ, Xₘₘ, Xₙₙ, Xₒₒ, Xₚₚ, X_{qq}, Xᵣᵣ, Xₛₛ, Xₜₜ, Xᵤᵤ, Xᵥᵥ, and X_{ww} are each independently either absent or selected from amino acid residues A, D, E, F, G, H, I, K, L, N, P, Q, R, S, T, V, Y, W and at least one of Xₑₑ, X_{ff}, X_{gg}, Xₕₕ, Xᵢᵢ, Xⱼⱼ is present and at least one of Xₑₑ, X_{ff}, X_{gg}, Xₕₕ, Xᵢᵢ, Xⱼⱼ is S, or
(v)
(SEQ ID NO: 24020)
XₐₐX_{bb}X_{cc}X_{dd}KXₑₑX_{ff}X_{gg}XₕₕXᵢᵢXⱼⱼKXₖₖXₗₗXₘₘXₙₙQHLCGS
HLVEALYLVCXₒₒXₚₚX_{qq}GFFYTXᵣᵣXₛₛXₜₜXᵤᵤXᵥᵥX_{ww},
wherein X_{aa′}, X_{bb′}, X_{cc′}, X_{dd′}, X_{ee′}, X_{ff′}, X_{gg′}, X_{hh′}, X_{ii′}, X_{jj′}, X_{kk′}, X_{ll′}, X_{mm′}, X_{nn′}, X_{oo′}, X_{pp′}, Xₐₐ, X_{bb}, X_{cc}, X_{dd}, Xₑₑ, X_{ff}, X_{gg}, Xₕₕ, Xᵢᵢ, Xⱼⱼ, Xₖₖ, Xₗₗ, Xₘₘ, Xₙₙ, Xₒₒ, Xₚₚ, X_{qq}, Xᵣᵣ, Xₛₛ, Xₜₜ, Xᵤᵤ, Xᵥᵥ, and X_{ww} are each independently either absent or selected from amino acid residues A, D, E, F, G, H, I, K, L, N, P, Q, R, S, T, V, Y, W and at least two of Xₑₑ, X_{ff}, X_{gg}, Xₕₕ, Xᵢᵢ, Xⱼⱼ are present and at least one of Xₑₑ, X_{ff}, X_{gg}, Xₕₕ, Xᵢᵢ, Xⱼⱼ is S, and another is G.

55. The insulin of claim 54, wherein the A-chain comprises a sequence selected from SEQ ID NOs 1 and 3 to 33, and is optionally appended at the N-terminus and/or at the C-terminus by at least one selected from KA, KD, KE, KF, KG, KH, KI, KL, KN, KP, KQ, KR, KS, KT, KY, KAA, KAD, KAE, KAF, KAG, KAH, KAI, KAL, KAN, KAQ, KAR, KAS, KAT, KAY, KDA, KDD, KDE, KDF, KDG, KDH, KDI, KDL, KDN, KDQ, KDR, KDS, KDT, KDY, KEA, KED, KEE, KEF, KEG, KEH, KEI, KEL, KEN, KEQ, KER, KES, KET, KEY, KFA, KFD, KFE, KFF, KFG, KFH, KFI, KFL, KFN, KFQ, KFR, KFS, KFT, KFY, KGA, KGD, KGE, KGF, KGG, KGH, KGI, KGL, KGN, KGQ, KGR, KGS, KGT, KGY, KHA, KHD, KHE, KHF, KHG, KHH, KHI, KHL, KHN, KHQ, KHR, KHS, KHT, KHY, KIA, KID, KIE, KIF, KIG, KIH, KII, KIL, KIN, KIQ, KIR, KIS, KIT, KIY, KLA, KLD, KLE, KLF, KLG, KLH, KLI, KLL, KLN, KLQ, KLR, KLS, KLT, KLY, KNA, KND, KNE, KNF, KNG, KNH, KNI, KNL, KNN, KNQ, KNR, KNS, KNT, KNY, KPA, KPD, KPE, KPF, KPG, KPH, KPI, KPL, KPN, KPQ, KPR, KPS, KPT, KPY, KQA, KQD, KQE, KQF, KQG, KQH, KQI, KQL, KQN, KQQ, KQR, KQS, KQT, KQY, KRA, KRD, KRE, KRF, KRG, KRH, KRI, KRL, KRN, KRQ, KRR, KRS, KRT, KRY, KSA, KSD, KSE, KSF, KSG, KSH, KSI, KSL, KSN, KSQ, KSR, KSS, KST, KSY, KTA, KTD, KTE, KTF, KTG, KTH, KTI, KTL, KTN, KTQ, KTR, KTS, KTT, KTY, KYA, KYD, KYE, KYF, KYG, KYH, KYI, KYL, KYN, KYQ, KYR, KYS, KYT, KYY, SEQ ID NOs 75 to 24014, KGSH (SEQ ID NO:24049), GKGSH (SEQ ID NO:24050), GKGSKK (SEQ ID NO:24045), GKKPGKK (SEQ ID NO:24046), GKGPSK (SEQ ID NO:24044), GKPSHKP (SEQ ID NO:24043), and GSHKGSHK (SEQ ID NO:24042); and
wherein the B-chain comprises a sequence selected from SEQ ID NOs 2 and 34 to 74, 24047, and 24048, and is optionally appended at the N-terminus and/or at the C-terminus by at least one selected from KA, KD, KE, KF, KG, KH, KI, KL, KN, KP, KQ, KR, KS, KT, KY, KAA, KAD, KAE, KAF, KAG, KAH, KAI, KAL, KAN, KAQ, KAR, KAS, KAT, KAY, KDA, KDD, KDE, KDF, KDG, KDH, KDI, KDL, KDN, KDQ, KDR, KDS, KDT, KDY, KEA, KED, KEE, KEF, KEG, KEH, KEI, KEL, KEN, KEQ, KER, KES, KET, KEY, KFA, KFD, KFE, KFF, KFG, KFH, KFI, KFL, KFN, KFQ, KFR, KFS, KFT, KFY, KGA, KGD, KGE, KGF, KGG, KGH, KGI, KGL, KGN, KGQ, KGR, KGS, KGT, KGY, KHA, KHD, KHE, KHF, KHG, KHH, KHI, KHL, KHN, KHQ, KHR, KHS, KHT, KHY, KIA, KID, KIE, KIF, KIG, KIH, KII, KIR, KIN, KIQ, KIR, KIS, KIT, KIY, KLA, KLD, KLE, KLF, KLG, KLH, KLI, KLL, KLN, KLQ, KLR, KLS, KLT, KLY, KNA, KND, KNE, KNF, KNG, KNH, KNI, KNL, KNN, KNQ, KNR, KNS, KNT, KNY, KPA, KPD, KPE, KPF, KPG, KPH, KPI, KPL, KPN, KPQ, KPR, KPS, KPT, KPY, KQA, KQD, KQE, KQF, KQG, KQH, KQI, KQL, KQN, KQQ, KQR, KQS, KQT, KQY, KRA, KRD, KRE, KRF, KRG, KRH, KRI, KRL, KRN, KRQ, KRR, KRS, KRT, KRY, KSA, KSD, KSE, KSF, KSG, KSH, KSI, KSL, KSN, KSQ, KSR, KSS, KST, KSY, KTA, KTD, KTE, KTF, KTG, KTH, KTI, KTL, KTN, KTQ, KTR, KTS, KTT, KTY, KYA, KYD, KYE, KYF, KYG, KYH, KYI, KYL, KYN, KYQ, KYR, KYS, KYT, KYY, SEQ ID NOs 75 to 24014, KGSH (SEQ ID NO:24049), GKGSH (SEQ ID NO:24050), GKGSKK (SEQ ID NO:24045), GKKPGKK (SEQ ID NO:24046), GKGPSK (SEQ ID NO:24044), GKPSHKP (SEQ ID NO:24043), and GSHKGSHK (SEQ ID NO:24042).

56.-66. (canceled)
